(19) United States
(12) Patent Application Publication
(10) Pub. No.: US 2019/0307868 A1
(43) Pub. Date: Oct. 10, 2019

(54) NEOANTIGENS AND METHODS OF THEIR USE

(71) Applicant: Neon Therapeutics, Inc., Cambridge, MA (US)

(72) Inventor: Michael Steven Rooney, Boston, MA (US)

(21) Appl. No.: 16/094,851

(22) PCT Filed: Mar. 31, 2017
(86) PCT No.: PCT/US17/25462

§ 371 Date: Oct. 18, 2018

Related U.S. Application Data
(60) Provisional application No. 62/316,530, filed on Mar. 31, 2016.
(60) Provisional application No. 62/316,533, filed on Mar. 31, 2016.
(60) Provisional application No. 62/316,547, filed on Mar. 31, 2016.
(60) Provisional application No. 62/316,552, filed on Mar. 31, 2016.
(60) Provisional application No. 62/316,567, filed on Apr. 1, 2016.
(60) Provisional application No. 62/316,571, filed on Apr. 1, 2016.

(51) Int. Cl. A61K 39/00; A61P 35/00; A61P 35/04; C07K 14/47; A61K 45/06

(52) U.S. Cl. CPC A61K 39/0011; A61K 2039/812; A61P 35/04; C07K 14/4748; A61K 45/06; A61K 39/001104; A61K 39/001106; A61K 39/001107; A61K 39/001103; A61K 39/001151; A61K 39/001162; A61K 39/001163; A61K 39/001164; A61K 39/001108; A61P 35/00

(57) ABSTRACT

The field of the present invention relates to immunotherapeutic peptides, peptide binding agents, and their use, for example, in the immunotherapy of cancer.

### CROSS-REFERENCE

[0001] This application claims priority to U.S. Provisional Application No. 62/316,530, filed Mar. 31, 2016, U.S. Provisional Application No. 62/316,533, filed Mar. 31, 2016, U.S. Provisional Application No. 62/316,547, filed Mar. 31, 2016, U.S. Provisional Application No. 62/316,552, filed Mar. 31, 2016, U.S. Provisional Application No. 62/316,567, filed Apr. 1, 2016, and U.S. Provisional Application No. 62/316,571, filed Apr. 1, 2016, each of which is incorporated herein by reference in their entirety.

### SEQUENCE LISTING

[0002] The instant application contains a Sequence Listing which has been submitted electronically in ASCII format and is hereby incorporated by reference in its entirety. Said ASCII copy, created on May 16, 2017, is named 50401-705_601_SL.txt and is 535,409 bytes in size.

### FIELD OF THE INVENTION

[0003] The field of the present invention relates to immunotherapeutic peptides, nucleic acids encoding the peptides, peptide binding agents, and their use, for example, in the immunotherapy of cancer. In one aspect, the invention provides neoantigenic peptides, useful alone or in combination with other tumor-associated peptides, anti-cancer, or immunomodulatory agents to treat cancer.

### BACKGROUND OF THE INVENTION

[0004] Tumor vaccines are typically composed of tumor antigens and immunostimulatory molecules (e.g., adjuvants, cytokines or TLR ligands) that work together to induce antigen-specific cytotoxic T cells (CTLs) that recognize and lyse tumor cells. Such vaccines contain either shared tissue restricted tumor antigens or a mixture of shared and patient-specific antigens in the form of whole tumor cell preparations. The shared tissue restricted tumor antigens are ideally immunogenic proteins with selective expression in tumors across many individuals and are commonly delivered to patients as synthetic peptides or recombinant proteins. In contrast, whole tumor cell preparations are delivered to patients as autologous irradiated cells, cell lysates, cell fusions, heat-shock protein preparations or total mRNA. Since whole tumor cells are isolated from the autologous patient, the cells may include patient-specific tumor antigens as well as shared tumor antigens. Finally, there is a third class of tumor antigens, neoantigens, that has rarely been used in vaccines, which consists of proteins with tumor-specific mutations (which can be patient-specific or shared) that result in altered amino acid sequences. Such mutated proteins are: (a) unique to the tumor cell as the mutation and it's corresponding protein are present only in the tumor, (b) avoid central tolerance and are therefore more likely to be immunogenic; (c) provide an excellent target for immune recognition including by both humoral and cellular immunity. However, the use of personalized neoantigens requires sequencing of each patient's genome and then production of a patient-specific neoantigen composition. Accordingly, there is still a need for developing additional cancer therapeutics.

### BRIEF SUMMARY OF THE INVENTION

[0005] Provided herein is an isolated neoantigenic peptide comprising a tumor-specific neoepitope, wherein the isolated neoantigenic peptide is not a native polypeptide, wherein the neoepitope comprises at least 8 contiguous amino acids of an amino acid sequence represented by: AxByCz, wherein each A and C represents an amino acid corresponding to the native polypeptide, y is at least 1 and B represents an amino acid substitution or insert of the native polypeptide, x+y+z is at least 8, the at least 8 contiguous amino acids comprises By, and the native polypeptide is encoded by a gene selected from the group consisting of: (a) ABL1, wherein AxByCz is (i) VADGLITTLHYPAPKRNKPTVYGVSPNYDKWEMERTDITMKHKLGGGQYGKVYEGVWKKYSLTV AVKTLKEDTMEVEEFLKEAAVMKEIKHPNLVQLLGVC (SEQ ID NO: 1), (ii) VADGLITTLHYPAPKRNKPTVYGVSPNYDKWEMERTDITMKHKLGGGQYGVVYEGVWKKYSLTV AVKTLKEDTMEVEEFLKEAAVMKEIKHPNLVQLLGVC (SEQ ID NO: 2), (iii) LLGVCTREPPFYIITEFMTYGNLLDYLRECNRQEVNAVVLLYMATQISSATEYLEKKNFIHRDLAARN CLVGENHLVKVADFGLSRLMTGDTYTAHAGAKF (SEQ ID NO: 3), (iv) SLTVAVKTLKEDTMEVEEFLKEAAVMKEIKHPNLVQLLGVCTREPPFYIIIEFMTYGNLLDYLRECNR QEVNAVVLLYMATQISSAMEYLEKKNFIHRDLA (SEQ ID NO: 4), or (v) STVADGLITTLHYPAPKRNKPTVYGVSPNYDKWEMERTDITMKHKLGGGQHGEVYEGVWKKYSLT VAVKTLKEDTMEVEEFLKEAAVMKEIKHPNLVQLLG (SEQ ID NO: 5); (b) ALK, wherein AxByCz is (i) SSLAMLDLLHVARDIACGCQYLEENHFIHRDIAARNCLLTCPGPGRVAKIADFGMARDIYRASYYRK GGCAMLPVKWMPPEAFMEGIFTSKTDTWSFGVLL (SEQ ID NO: 6), or (ii) QVAVKTLPEVCSEQDELDFLMEALIISKFNHQNIVRCIGVSLQSLPRFILMELMAGGDLKSFLRETRPR PSQPSSLAMLDLLHVARDIACGCQYLEENHFI (SEQ ID NO: 7); (c) BRAF, wherein AxByCz is MIKLIDIARQTAQGMDYLHAKSIIHRDLKSNNIFLHEDLTVKIGDFGLATEKSRWSGSHQFEQLSGSIL WMAPEVIRMQDKNPYSFQSDVYAFGIVLYELM (SEQ ID NO: 8); (d) BTK, wherein AxByCz is MIKEGSMSEDEFIEEAKVMMNLSHEKLVQLYGVCTKQRPIFIITEYMANGSLLNYLREMRHRFQTQQ LLEMCKDVCEAMEYLESKQFLHRDLAARNCLVND (SEQ ID NO: 9); (e) EEF1B2, wherein AxByCz is MGFGDLKSPAGLQVLNDYLADKSYIEGYVPSQADVAVFEAVSGPPPADLCHALRWYNHIKSYEKEK ASLPGVKKALGKYGPADVEDTTGSGAT (SEQ ID NO: 10); (f) EGFR, wherein AxByCz is (i) SLNITSLGLRSLKEISDGDVIISGNKNLCYANTINWKKLFGTSGQKTKIIRNRGENSCKATGQVCHALC SPEGCWGPEPRDCVSCRNVSRGRECVDKCNLL (SEQ ID NO: 11), or (ii) IPVAIKELREATSPKANKEILDEAYVMASVDNPHVCRLLGICLTSTVQLIMQLMPFGCLLDYVREHKD NIGSQYLLNWCVQIAKGMNYLEDRRLVHRDLAA (SEQ ID NO: 12); (g) ERBB3, wherein AxByCz is ERCEVVMGNLEIVLTGHNADLSFLQWIREVTGYVLVAMNEFSTLPLPNLRMVRGTQVYDGKFAIFV MLNYNTNSSHALRQLRLTQLTEILSGGVYIEKNDK (SEQ ID NO: 13); (h) ESR1, wherein AxByCz is (i) HLMAKAGLTLQQQHQRLAQLLLILSHIRHMSNKGMEHLYSMKCKNVVPLYGLLLEMLDAHRLHAP TSRGGASVEETDQSHLATAGSTSSHSLQKYYITGEA (SEQ ID NO: 14), (ii) NQGKCVEGMVEIFDMLLATSSRFRMMNLQGEEFVCLKSIILLNSGVYTFLPSTLKSLEEKDHIHRVLD KITDTLIHLMAKAGLTLQQQHQRLAQLLLILSH (SEQ ID NO: 15), (iii) IHLMAKAGLTLQQQHQRLAQLLLILSHIRHMSNKGMEHLYSMKCKNVVPLCDLLLEMLDAHRLHAP TSRGGASVEETDQSHLATAGSTSSHSLQKYYITGE (SEQ ID NO: 16), (iv) IHLMAKAGLTLQQQHQRLAQLLLILSHIRHMSNKGMEHLYSMKCKNVVPLNDLLLEMLDAHRLHAP TSRGGASVEETDQSHLATAGSTSSHSLQKYYITGE (SEQ ID NO: 17), or (v) IHLMAKAGLTLQQQHQRLAQLLLILSHIRHMSNKGMEHLYSMKCKNVVPLSDLLLEMLDAHRLHAP TSRGGASVEETDQSHLATAGSTSSHSLQKYYITGE (SEQ ID NO: 18); (i) FGFR3, wherein AxByCz is HRIGGIKLRHQQWSLVMESVVPSDRGNYTCVVENKFGSIRQTYTLDVLERCPHRPILQAGLPANQTA VLGSDVEFHCKVYSDAQPHIQWLKHVEVNGSKVG (SEQ ID NO: 19); (j) FRG1B, wherein AxByCz is AVKLSDSRIALKSGYGKYLGINSDELVGHSDAIGPREQWEPVFQNGKMALSASNSCFIRCNEAGDIEA KSKTAGEEEMIKIRSCAEKETKKKDDIPEEDKG (SEQ ID NO: 20); (k) HER2, wherein AxByCz is GSGAFGTVYKGIWIPDGENVKIPVAIKVLRENTSPKANKEILDEAYVMAGLGSPYVSRLLGICLTSTV QLVTQLMPYGCLLDHVRENRGRLGSQDLLNWCM (SEQ ID NO: 21); (1) IDH1, wherein AxByCz is (i) RVEEFKLKQMWKSPNGTIRNILGGTVFREAIICKNIPRLVSGWVKPIIIGHHAYGDQYRATDFVVPGP GKVEITYTPSDGTQKVTYLVHNFEEGGGVAMGM (SEQ ID NO: 22), (ii) RVEEFKLKQMWKSPNGTIRNILGGTVFREAIICKNIPRLVSGWVKPIIIGCHAYGDQYRATDFVVPGPG KVEITYTPSDGTQKVTYLVHNFEEGGGVAMGM (SEQ ID NO: 23), (iii) RVEEFKLKQMWKSPNGTIRNILGGTVFREAIICKNIPRLVSGWVKPIIIGGHAYGDQYRATDFVVPGP GKVEITYTPSDGTQKVTYLVHNFEEGGGVAMGM (SEQ ID NO: 24), or (iv) RVEEFKLKQMWKSPNGTIRNILGGTVFREAIICKNIPRLVSGWVKPIIIGSHAYGDQYRATDFVVPGPG KVEITYTPSDGTQKVTYLVHNFEEGGGVAMGM (SEQ ID NO: 25); (m) KIT, wherein AxByCz is (i) VEATAYGLIKSDAAMTVAVKMLKPSAHLTEREALMSELKVLSYLGNHMNIANLLGACTIGGPTLVIT EYCCYGDLLNFLRRKRDSFICSKQEDHAEAALYK (SEQ ID NO: 26), or (ii) VEATAYGLIKSDAAMTVAVKMLKPSAHLTEREALMSELKVLSYLGNHMNIANLLGACTIGGPTLVIT EYCCYGDLLNFLRRKRDSFICSKQEDHAEAALYK (SEQ ID NO: 26); (n) MEK, wherein AxByCz is (i) ISELGAGNGGVVFKVSHKPSGLVMARKLIHLEIKPAIRNQIIRELQVLHESNSPYIVGFYGAFYSDGEIS ICMEHMDGGSLDQVLKKAGRIPEQILGKVSI (SEQ ID NO: 27), or (ii) LGAGNGGVVFKVSHKPSGLVMARKLIHLEIKPAIRNQIIRELQVLHECNSLYIVGFYGAFYSDGEISIC MEHMDGGSLDQVLKKAGRIPEQILGKVSIAVI (SEQ ID NO: 28); (o) MYC, wherein AxByCz is (i) MPLNVSFTNRNYDLDYDSVQPYFYCDEEENFYQQQQQSDLQPPAPSEDIWKKFELLPTPPLSPSRRSG LCSPSYVAVTPFSLRGDNDGG (SEQ ID NO: 29), (ii) FTNRNYDLDYDSVQPYFYCDEEENFYQQQQQSELQPPAPSEDIWKKFELLSTPPLSPSRRSGLCSPSY VAVTPFSLRGDNDGGGGSFSTADQLEMVTELLG (SEQ ID NO: 30), or (iii) TNRNYDLDYDSVQPYFYCDEEENFYQQQQQSELQPPAPSEDIWKKFELLPIPPLSPSRRSGLCSPSYVA VTPFSLRGDNDGGGGSFSTADQLEMVTELLGG (SEQ ID NO: 31); (p) PDGFRa, wherein AxByCz is VAVKMLKPTARSSEKQALMSELKIMTHLGPHLNIVNLLGACTKSGPIYIIIEYCFYGDLVNYLHKNRD SFLSHHPEKPKKELDIFGLNPADESTRSYVILS (SEQ ID NO: 32); (q) PIK3CA, wherein AxByCz is (i) IEEHANWSVSREAGFSYSHAGLSNRLARDNELRENDKEQLKAISTRDPLSKITEQEKDFLWSHRHYC VTIPEILPKLLLSVKWNSRDEVAQMYCLVKDWPP (SEQ ID NO: 33), (ii) HANWSVSREAGFSYSHAGLSNRLARDNELRENDKEQLKAISTRDPLSEITKQEKDFLWSHRHYCVTI PEILPKLLLSVKWNSRDEVAQMYCLVKDWPPIKP (SEQ ID NO: 34), or (iii) LFINLFSMMLGSGMPELQSFDDIAYIRKTLALDKTEQEALEYFMKQMNDARHGGWTTKMDWIFHTI KQHALN (SEQ ID NO: 35); (r) POLE, wherein AxByCz is QRGGVITDEEETSKKIADQLDNIVDMREYDVPYHIRLSIDIETTKLPLKFRDAETDQIMMISYMIDGQG YLITNREIVSEDIEDFEFTPKPEYEGPFCVFN (SEQ ID NO: 36); (s) PTEN, wherein AxByCz is KFNCRVAQYPFEDHNPPQLELIKPFCEDLDQWLSEDDNHVAAIHCKAGKGQTGVMICAYLLHRGKF LKAQEALDFYGEVRTRDKKGVTIPSQRRYVYYYSY (SEQ ID NO: 37); (t) RAC1, wherein AxByCz is MQAIKCVVVGDGAVGKTCLLISYTTNAFSGEYIPTVFDNYSANVMVDGKPVNLGLWDTAGQEDYD RLRPLSYPQTVGET (SEQ ID NO: 38); and (u) TP53, wherein AxByCz is (i) IRVEGNLRVEYLDDRNTFRHSVVVPYEPPEVGSDCTTIHYNYMCNSSCMGSMNRRPILTIITLEDSSG NLLGRNSFEVRVCACPGRDRRTEEENLRKKGEP (SEQ ID NO: 39), (ii) TYSPALNKMFCQLAKTCPVQLWVDSTPPPGTRVRAMAIYKQSQHMTEVVRHCPHHERCSDSDGLAP PQHLIRVEGNLRVEYLDDRNTFRHSVVVPYEPPEV (SEQ ID NO: 40), (iii) EGNLRVEYLDDRNTFRHSVVVPYEPPEVGSDCTTIHYNYMCNSSCMGGMNQRPILTIITLEDSSGNLL GRNSFEVRVCACPGRDRRTEEENLRKKGEPHHE (SEQ ID NO: 41), (iv) EGNLRVEYLDDRNTFRHSVVVPYEPPEVGSDCTTIHYNYMCNSSCMGGMNWRPILTIITLEDSSGNLL GRNSFEVRVCACPGRDRRTEEENLRKKGEPHHE (SEQ ID NO: 42), or (v) PEVGSDCTTIHYNYMCNSSCMGGMNRRPILTIITLEDSSGNLLGRNSFEVCVCACPGRDRRTEEENLR KKGEPHHELPPGSTKRALPNNTSSSPQPKKKPL (SEQ ID NO: 43).

[0006] In embodiments, the native polypeptide is encoded by the EGFR, ERBB3 or FGFR3 gene and at least one By is expressed extracellularly.

[0007] Provided herein is an isolated neoantigenic peptide comprising a tumor-specific neoepitope, wherein the isolated neoantigenic peptide is not a native polypeptide, wherein the neoepitope comprises at least 8 contiguous amino acids of an amino acid sequence represented by: AxByCz, wherein each A is an amino acid corresponding to the native polypeptide; By is absent; each C is an amino acid encoded by a frameshift of a sequence encoding the native polypeptide; x+y+z is at least 8; the at least 8 contiguous amino acids comprises at least one Cz; and the native polypeptide is encoded by a gene selected from the group consisting of: (a) APC, wherein Cz is (i) AKFQQCHSTLEPNPADCRVLVYLQNQPGTKLLNFLQERNLPPKVVLRHPKVHLNTMFRRPHSCLAD VLLSVHLIVLRVVRLPAPFRVNHAVEW (SEQ ID NO: 44), (ii) APVIFQIALDKPCHQAEVKHLHHLLKQLKPSEKYLKIKHLLLKRERVDLSKLQ (SEQ ID NO: 45), or (iii) MLQFRGSRFFQMLILYYILPRKVLQMDFLVHPA (SEQ ID NO: 46); (b) ARID1A, wherein Cz is (i) ALGPHSRISCLPTQTRGCILLAATPRSSSSSSSNDMIPMAISSPPKAPLLAAPSPASRLQCINSNSRITSGQ WMAHMALLPSGTKGRCTACHTALGRGSLSSSSCPQPSPSLPASNKLPSLPLSKMYTTSMAMPILPLPQ LLLSADQQAAPRTNFHSSLAETVSLHPLAPMPSKTCHHK (SEQ ID NO: 47), (ii) AHQGFPAAKESRVIQLSLLSLLIPPLTCLASEALPRPLLALPPVLLSLAQDHSRLLQCQATRCHLGHPV ASRTASCILP (SEQ ID NO: 48), (iii) PILAATGTSVRTAARTWVPRAAIRVPDPAAVPDDHAGPGAECHGRPLLYTADSSLWTTRPQRVWST GPDSILQPAKSSPSAAAATLLPATITVPDPSCPTFVSAAATVSTITAPVLSASILPAAIPASTSAVPGSIPL PAVDDTAAPPEPAPLLTATGSVSLPAAATSAASTLDALPAGCVSSAPVSAVPANCLFPAALPSTAGAIS RFIWVSGILSPLNDLQ (SEQ ID NO: 49), (iv) PCRAGRRVPWAASLIHSRFLLMDNKAPAGMVNRARLHITTSKVLTLSSSSHPTPSNHRPRPLMPNLRI SSSHSLNHHSSSPLSLHTPSSHPSLHISSPRLHTPPSSRRHSSTPRASPPTHSHRLSLLTSSSNLSSQHPRR SPSRLRILSPSLSSPSKLPIPSSASLHRRSYLKIHLGLRHPQPPQ (SEQ ID NO: 50), (v) RTNPTVRMRPHCVPFWTGRILLPSAASVCPIPFEACHLCQAMTLRCPNTQGCCSSWAS (SEQ ID NO: 51), or (vi) TNQALPKIEVICRGTPRCPSTVPPSPAQPYLRVSLPEDRYTQAWAPTSRTPWGAMVPRGVSMAHKVA TPGSQTIMPCPMPTTPVQAWLEA (SEQ ID NO: 52); (c) β2M, wherein Cz is (i) RMERELKKWSIQTCLSARTGLSISCTTLNSPPLKKMSMPAV (SEQ ID NO: 53), or (ii) LCSRYSLFLAWRLSSVLQRFRFTHVIQQRMESQIS (SEQ ID NO: 54); (d) CDH1, wherein Cz is (i) RSACVTVKGPLASVGRHSLSKQDCKFLPFWGFLEEFLLC (SEQ ID NO: 55), (ii) IQWGTTAPRPIRPPFLESKQNCSHFPTPLLASEDRRETGLFLPSAAQKMKKAHFLKTWFRSNPTKTK KARFSTASLAKELTHPLLVSLLLKEKQDG (SEQ ID NO: 56), (iii) PTDPFLGLRLGLHLQKVFHQSHAEYSGAPPPPPAPSGLRFWNPSRIAHISQLLSWPQKTEERLGYSSHQ LPRK (SEQ ID NO: 57), (iv) FCCSCCFFGGERWSKSPYCPQRMTPGTTFITMMKKEAEKRTRTLT (SEQ ID NO: 58), or (v) WRRNCKAPVSLRKSVQTPARSSPARPDRTRRLPSLGVPGQPWALGAAASRRCCCCCRSPLGSARSRS PATLALTPRATRSRCPGATWREAASWAE (SEQ ID NO: 59); (e) GATA3, wherein Cz is (i) PGRPLQTHVLPEPHLALQPLQPHADHAHADAPAIQPVLWTTPPLQHGHRHGLEPCSMLTGPPARVPA VPFDLHFCRSSIMKPKRDGYMFLKAESKIMFATLQRSSLWCLCSNH (SEQ ID NO: 60); or (ii) PRPRRCTRHPACPLDHTITPPAWSPPWVRALLDAHRAPSESPCSPFRLAFLQEQYHEA (SEQ ID NO: 61); (1) MLL2, wherein Cz is TRRCHCCPHLRSHPCPHHLRNHPRPHHLRHHACHHHLRNCPHPHFLRHCTCPGRWRNRPSLRRLRSL LCLPHLNHHLFLHWRSRPCLHRKSHPHLLHLRRLYPHHLKHRPCPHHLKNLLCPRHLRNCPLPRHLK HLACLHHLRSHPCPLHLKSHPCLHHRRHLVCSHHLKSLLCPLHLRSLPFPHHLRHHACPHHLRTRLCP HHLKNHLCPPHLRYRAYPPCLWCHACLHRLRNLPCPHRLRSLPRPLHLRLHASPHHLRTPPHPHHLR THLLPHHRRTRSCPCRWRSHPCCHYLRSRNSAPGPRGRTCHPGLRSRTCPPGLRSHTYLRRLRSHTCP PSLRSHAYALCLRSHTCPPRLRDHICPLSLRNCTCPPRLRSRTCLLCLRSHACPPNLRNHTCPPSLRSHA CPPGLRNRICPLSLRSHPCPLGLKSPLRSQANALHLRSCPCSLPLGNHPYLPCLESQPCLSLGNHLCPLC PRSCRCPHLGSHPCRLS (SEQ ID NO: 62); (g) PTEN, wherein Cz is (i) SWKGTNWCNDMCIFITSGQIFKGTRGPRFLWGSKDQRQKGSNYSQSEALCVLL (SEQ ID NO: 63), (ii) KRTKCFTFG (SEQ ID NO: 64), (iii) PIFIQTLLLWDFLQKDLKAYTGTILMM (SEQ ID NO: 65), (iv) QKMILTKQIKTKPTDTFLQILR (SEQ ID NO: 66), (v) GFWIQSIKTITRYTIFVLKDIMTPPNLIAELHNILLKTITHHS (SEQ ID NO: 67), (vi) NYSNVQWRNLQSSVCGLPAKGEDIFLQFRTHTTGRQVHVL (SEQ ID NO: 68), or (vii) YQSRVLPQTEQDAKKGQNVSLLGKYILHTRTRGNLRKSRKWKSM (SEQ ID NO: 69); (h) TP53, wherein Cz is (i) SSQNARGCSPRGPCTSSSYTGGPCTSPLLAPVIFCPFPENLPGQLRFPSGLLAFWDSQVCDLHVLPCPQ QDVLPTGQDLPCAAVG (SEQ ID NO: 70), (ii) GAAPTMSAAQIAMVWPLLSILSEWKEICVWSIWMTETLFDIVWWCPMSRLRLALTVPPSTTITCVTV PAWAA (SEQ ID NO: 71), (iii) TGGPSSPSSHWKTPVVIYWDGTALRCVFVPVLGETGAQRKRISARKGSLTTSCPQGALSEHCPTTPAP LPSQRRNHWMENISPFRSVGVSASRCSES (SEQ ID NO: 72), (iv) FHTPARHPRPRHGHLQAVTAHDGGCEALPPP (SEQ ID NO: 73), (v) CCPRTILNNGSLKTQVQMKLPECQRLLPPWPLHQQLLHRRPLHQPPPGPCHLLSLPRKPTRAATVSV WASCILGQPSL (SEQ ID NO: 74), (vi) VRKHFQTYGNYFLKTTFCPPCRPKQWMI (SEQ ID NO: 75), or (vii) LARTPLPSTRCFANWPRPALCSCGLIPHPRPAPASAPWPSTSSHST (SEQ ID NO: 76); or (i) VHL wherein Cz is (i) ELQETGHRQVALRRSGRPPKCAERPGAADTGAHCTSTDGRLKISVETYTVSSQLLMVLMSLDLDTGL VPSLVSKCLILRVK (SEQ ID NO: 77), (ii) KSDASRLSGA (SEQ ID NO: 78), (iii) RTAYFCQYHTASVYSERAMPPGCPEPSQA (SEQ ID NO: 79), (iv) TRASPPRSSSAIAVRASCCPYGSTSTASRSPTQRCRLARAAASTATEVTFGSSEMQGHTMGFWLTKLN YLCHLSMLTDSLFLPISHCQCIL (SEQ ID NO: 80), (v) SSLRITGDWTSSGRSTKIWKTTQMCRKTWSG (SEQ ID NO: 81), or (vi) RRRRGGVGRRGVRPGRVRPGGTGRRGGDGGRAAAARAALGELARALPGHLLQSQSARRAARMAQ LRRRAAALPNAAAWHGPPHPQLPRSPLALQRCRDTRWASG (SEQ ID NO: 82); (j) ACVR2A, wherein AxByCz is (i) GVEPCYGDKDKRRHCFATWKNISGSIEIVKQGCWLDDINCYDRTDCVEKKRQP (SEQ ID NO: 83), or (ii) GVEPCYGDKDKRRHCFATWKNISGSIEIVKQGCWLDDINCYDRTDCVEKKTALKYIFVAVRAICVM KSFLIFRRWKSHSPLQIQLHLSHPITTSCSIPWCHLC (SEQ ID NO: 84); (k) C15ORF40, wherein AxByCz is TAEAVNVAIAAPPSEGEANAELCRYLSKVLELRKSDVVLDKVGLALFFFFFETKSCSVAQAGVQWRS LGSLQPPPPGFKLFSCLSFLSSWDYRRMPPCLANFCIFNRDGVSPCWSGWS (SEQ ID NO: 85); (1) CNOT1, wherein AxByCz is (i) LSVIIFFFVYIWHWALPLILNNHHICLMSSIILDCNSVRQSIMSVCFFFFSVIFSTRCLTDSRYPNICWFK (SEQ ID NO: 86), or (ii) LSVIIFFFVYIWHWALPLILNNHHICLMSSIILDCNSVRQSIMSVCFFFFCYILNTMFDR (SEQ ID NO: 87); (m) EIF2B3, wherein AxByCz or Cz is VLVLSCDLITDVALHEVVDLFRAYDASLAMLMRKGQDSIEPVPGQKGKKKQWSSVTSLEWTAQERG CSSWLMKQTWMKSWSLRDPSYRSILEYVSTRVLWMPTSTV (SEQ ID NO: 88); (n) EPHB2, wherein AxByCz or Cz is SIQVMRAQMNQIQSVEGQPLARRPRATGRTKRCQPRDVTKKTCNSNDGKKREWEKRKQILGGGGK YKEYFLKRILIRKAMTVLAGDKKGLGRFMRCVQSETKAVSLQLPLGR (SEQ ID NO: 89); (o) ESRP1, wherein AxByCz is (i) LDFLGEFATDIRTHGVHMVLNHQGRPSGDAFIQMKSADRAFMAAQKCHKKKHEGQIC (SEQ ID NO: 90), or (ii) LDFLGEFATDIRTHGVHMVLNHQGRPSGDAFIQMKSADRAFMAAQKCHKKT (SEQ ID NO: 91); (p) FAM11B, wherein AxByCz is GALCKDGRFRSDIGEFEWKLKEGHKKIYGKQSMVDEVSGKVLEMDISKKKHYNRKISIKKLNRMKV PLMKLITRV (SEQ ID NO: 92); (q) GBP3, wherein AxByCz is RERAQLLEEQEKTLTSKLQEQARVLKERCQGESTQLQNEIQKLQKTLKKKPRDICRIS (SEQ ID NO: 93); (r) JAK1, wherein AxByCz is (i) VNTLKEGKRLPCPPNCPDEVYQLMRKCWEFQPSNRTSFQNLIEGFEALLKTSN (SEQ ID NO: 94) or (ii) CRPVTPSCKELADLMTRCMNYDPNQRPFFRAIMRDINKLEEQNPDIVSEKNQQLKWTPHILKSAS (SEQ ID NO: 95); (s) LMAN1, wherein AxByCz is (i) DDHDVLSFLTFQLTEPGKEPPTPDKEISEKEKEKYQEEFEHFQQELDKKKRGIPEGPPRPPRAACGGNI (SEQ ID NO: %), or (ii) DDHDVLSFLTFQLTEPGKEPPTPDKEISEKEKEKYQEEFEHFQQELDKKKRNSRRATPTSKGSLRRKY LRV (SEQ ID NO: 97); (t) MSH3, wherein AxByCz is (i) TKSTLIGEDVNPLIKLDDAVNVDEIMTDTSTSYLLCISENKENVRDKKKGQHFYWHCGSAACHRRGC V (SEQ ID NO: 98), or (ii) LYTKSTLIGEDVNPLIKLDDAVNVDEIMTDTSTSYLLCISENKENVRDKKRATFLLALWECSLPQARL CLIVSRTLLLVQS (SEQ ID NO: 99); (u) NDUFC2, wherein AxByCz is (i) LPPPKLTDPRLLYIGFLGYCSGLIDNLIRRRPIATAGLHRQLLYITAFFFCWILSCKT (SEQ ID NO: 100), or (ii) SLPPPKLTDPRLLYIGFLGYCSGLIDNLIRRRPIATAGLHRQLLYITAFFLLDIIL (SEQ ID NO: 101); (v) RBM27, wherein AxByCz is NQSGGAGEDCQIFSTPGHPKMIYSSSNLKTPSKLCSGSKSHDVQEVLKKKTGSNEVTTRYEEKKTGSV RKANRMPKDVNIQVRKKQKHETRRKSKYNEDFERAWREDLTIKR (SEQ ID NO: 102); (w) RPL22, wherein AxByCz is (i) MAPVKKLVVKGGKKKEASSEVHS (SEQ ID NO: 103), or (ii) MAPVKKLVVKGGKKRSKF (SEQ ID NO: 104); (x) SEC31A, wherein AxByCz is (i) MPSHQGAEQQQQQHHVFISQVVTEKEFLSRSDQLQQAVQSQGFINYCQKKN (SEQ ID NO: 105), or (ii) MPSHQGAEQQQQQHHVFISQVVTEKEFLSRSDQLQQAVQSQGFINYCQKKLMLLRLNLRKMCGPF (SEQ ID NO: 106); (y) SEC63, wherein AxByCz is (i) AEVFEKEQSICAAEEQPAEDGQGETNKNRTKGGWQQKSKGPKKTAKSKKKETFKKKTYTCAITTVK ATETKAGKWSRWE (SEQ ID NO: 107), or (ii) MAEVFEKEQSICAAEEQPAEDGQGETNKNRTKGGWQQKSKGPKKTAKSKKRNL (SEQ ID NO: 108); (z) SLC35F5, wherein AxByCz is NIMEIRQLPSSHALEAKLSRMSYPVKEQESILKTVGKLTATQVAKISFFFALCGFWQICHIKKHFQTHK LL (SEQ ID NO: 109); (aa) SMAP1, wherein AxByCz is (i) YEKKKYYDKNAIAITNISSSDAPLQPLVSSPSLQAAVDKNKLEKEKEKKKGREKERKGARKAGKTTY S (SEQ ID NO: 110), or (ii) KYEKKKYYDKNAIAITNISSSDAPLQPLVSSPSLQAAVDKNKLEKEKEKKRKRKREKRSQKSRQNHL QLKSCRRKISNWSLKKVPALKKLRSPLWIF (SEQ ID NO: 111); (bb) TFAM, wherein AxByCz is (i) IYQDAYRAEWQVYKEEISRFKEQLTPSQIMSLEKEIMDKHLKRKAMTKKKRVNTAWKTKKTSFSL (SEQ ID NO: 112), or (ii) IYQDAYRAEWQVYKEEISRFKEQLTPSQIMSLEKEIMDKHLKRKAMTKKKS (SEQ ID NO: 113); (cc) TGFBR2, wherein AxByCz is (i) KPQEVCVAVWRKNDENITLETVCHDPKLPYHDFILEDAASPKCIMKEKKKAW (SEQ ID NO: 114), or (ii) EKPQEVCVAVWRKNDENITLETVCHDPKLPYHDFILEDAASPKCIMKEKKSLVRLSSCVPVALMSAM TTSSSQKNITPAILTCC (SEQ ID NO: 115); (dd) THAP5, wherein AxByCz is VPSKYQFLCSDHFTPDSLDIRWGIRYLKQTAVPTIFSLPEDNQGKDPSKKNPRRKTWKMRKKYAQKP SQKNHLY (SEQ ID NO: 116); (ee) UTK, wherein AxByCz is GTEEMKYVLGQLVGLNSPNSILKAAKTLYEHYSGGESHNSSSSKTFEKKGEKNDLQLFVMSDTTYK IYWTVILLNPCGNLHLKTTSL (SEQ ID NO: 117); and (ff) XPOT, wherein AxByCz is QQLIRETLISWLQAQMLNPQPEKTFIRNKAAQVFALLFVTEYLTKWPKFFLTFSQ (SEQ ID NO: 118).

[0008] Provided herein is an isolated neoantigenic peptide comprising a tumor-specific neoepitope, wherein the isolated neoantigenic peptide is not a native polypeptide, wherein the neoepitope comprises at least 8 contiguous amino acids of an amino acid sequence represented by: AxByCz, wherein each A is an amino acid corresponding to a first native polypeptide; each C is an amino acid corresponding to a second native polypeptide, or a cryptic exon or exon of a splice variant of the first native polypeptide, each B is an amino acid that is not an amino acid corresponding to the first native polypeptide, the second native polypeptide, or the cryptic exon of the first native polypeptide, and x+y+z is at least 8, wherein y is absent and the at least 8 contiguous amino acids comprises at least one Ax and at least one Cz, or y is at least 1 and the at least 8 contiguous amino acids comprises at least one By, wherein: (a) the first native polypeptide is encoded by a BCR gene, the second native polypeptide is encoded by an ABL gene, and (i) y is 0, and AxByCz is ERAEWRENIREQQKKCFRSFSLTSVELQMLTNSCVKLQTVHSIPLTINKEEALQRPVASDFEPQGLSEA ARWNSKENLLAGPSENDPNLFVALYDFVASG (SEQ ID NO: 119), or (ii) y is 1, and AxByCz is ELQMLTNSCVKLQTVHSIPLTINKEDDESPGLYGFLNVIVHSATGFKQSSKALQRPVASDFEPQGLSE AARWNSKENLLAGPSENDPNLFVALYDFVASGD (SEQ ID NO: 120); (b) the first native polypeptide is encoded by a C11orf95 gene, the second native polypeptide is encoded by an RELA gene, y is 1, and AxByCz is ISNSWDAHLGLGACGEAEGLGVQGAEEEEEEEEEEEEEGAGVPACPPKGPELFPLIFPAEPAQASGPY VEIIEQPKQRGMRFRYKCEGRSAGSIPGERSTD (SEQ ID NO: 121); (c) the first native polypeptide is encoded by a CBFB gene and the second native polypeptide is encoded by an MYH11 gene, y is 0, and AxByCz is LQRLDGMGCLEFDEERAQQEDALAQQAFEEARRRTREFEDRDRSHREEMEVHELEKSKRALETQME EMKTQLEELEDELQATEDAKLRLEVNMQALKGQF (SEQ ID NO: 122); (d) the first native polypeptide is encoded by a CD74 gene and the second native polypeptide is encoded by an ROS1 gene, y is 0, and AxByCz is KGSFPENLRHLKNTMETIDWKVFESWMHHWLLFEMSRHSLEQKPTDAPPKAGVPNKPGIPKLLEGS KNSIQWEKAEDNGCRITYYILEIRKSTSNNLQNQ (SEQ ID NO: 123); (e) the first native polypeptide is encoded by an EGFR gene and the second native polypeptide is encoded by (i) an SEPT14 gene, y is 0, and AxByCz is LPQPPICTIDVYMIMVKCWMIDADSRPKFRELIIEFSKMARDPQRYLVIQLQDKFEHLKMIQQEEIRKL EEEKKQLEGEIIDFYKMKAASEALQTQLSTD (SEQ ID NO: 124); or (ii) an EGFR gene, y is 1, and AxByCz is MRPSGTAGAALLALLAALCPASRALEEKKGNYVVTDHGSCVRACGADSYEMEEDGVRKCKKCEGP CRKVCNGIGIGEFKD (SEQ ID NO: 125); (f) the first native polypeptide is encoded by a EML4 gene, the second native polypeptide is encoded by an ALK gene, y is 1, and AxByCz is SWENSDDSRNKLSKIPSTPKLIPKVTKTADKHKDVIINQAKMSTREKNSQVYRRKHQELQAMQMEL QSPEYKLSKLRTSTIMTDYNPNYCFAGKTSSISDL (SEQ ID NO: 126) (g) the first native polypeptide is encoded by a FGFR3 gene, the second native polypeptide is encoded by an TACC3 gene, y is 0, and AxByCz is EGHRMDKPANCTHDLYMIMRECWHAAPSQRPTFKQLVEDLDRVLTVTSTDVKATQEENRELRSRCE ELHGKNLELGKIMDRFEEVVYQAMEEVQKQKELS (SEQ ID NO: 127), (h) the first native polypeptide is encoded by a NAB gene, the second native polypeptide is encoded by an STAT6 gene, y is at least 1, and AxByCz is RDNTLLLRRVELFSLSRQVARESTYLSSLKGSRLHPEELGGPPLKKLKQEATSKSQIMSLWGLVSKMP PEKVQRLYVDFPQHLRHLLGDWLESQPWEFLVGSDAFCC (SEQ ID NO: 128); (i) the second native polypeptide is encoded by an ERG, y is 0, and (i) the first native polypeptide is encoded by a NDRG1 gene, and AxByCz is MSREMQDVDLAEVKPLVEKGETITGLLQEFDVQEALSVVSEDQSLFECAYGTPHLAKTEMTASSSSD YGQTSKMSPRVPQQDW (SEQ ID NO: 129) or (ii) the first native polypeptide is encoded by a TMPRSS2 gene, and AxByCz is MALNSEALSVVSEDQSLFECAYGTPHLAKTEMTASSSSDYGQTSKMSPRVPQQDW (SEQ ID NO: 130); (j) the first native polypeptide is encoded by a PML gene, the second native polypeptide is encoded by an RARA gene, y is 1, and AxByCz is (i) VLDMHGFLRQALCRLRQEEPQSLQAAVRTDGFDEFKVRLQDLSSCITQGKAIETQSSSSEEIVPSPPSP PPLPRIYKPCFVCQDKSSGYHYGVSACEGCKG (SEQ ID NO: 131), or (ii) RSSPEQPRPSTSKAVSPPHLDGPPSPRSPVIGSEVFLPNSNHVASGAGEAAIETQSSSSEEIVPSPPSPPPL PRIYKPCFVCQDKSSGYHYGVSACEGCKG (SEQ ID NO: 132); (k) the first native polypeptide is encoded by a RUNX1 gene, the second native polypeptide is encoded by an CBFA2T1 (RUNX1T1) gene, y is 1, and AxByCz is VARFNDLRFVGRSGRGKSFTLTITVFTNPPQVATYHRAIKITVDGPREPRNRTEKHSTMPDSPVDVKT QSRLTPPTMPPPPTQGAPRTSSFTPTTLTNGT (SEQ ID NO: 133); (1) the first native polypeptide is encoded by a AR-v7 gene, the cryptic exon or the exon of a splice variant is encoded by the AR-v7 gene, y is 0, and AxByCz is

(SEQ ID NO: 134)

SCKVFFKRAAEGKQKYLCASRNDCTIDKFRRKNCPSCRLRKCYEAGMTLG
EKFRVGNCKHLKMTRP.

[0009] Provided herein is an isolated neoantigenic peptide comprising a tumor-specific neoepitope, wherein the isolated neoantigenic peptide is not a native polypeptide, wherein the neoepitope comprises at least 8 contiguous amino acids of an amino acid sequence represented by: AxByCz wherein each A is an amino acid corresponding to a first native polypeptide; each B is an amino acid that is not an amino acid corresponding to the first native polypeptide or the second native polypeptide, each C is an amino acid encoded by a frameshift of a sequence encoding a second native polypeptide; x+y+z is at least 8, wherein y is absent and the at least 8 contiguous amino acids comprises at least one Cz, or y is at least 1 and the at least 8 contiguous amino acids comprises at least one By and/or at least one Cz; and (a) the first native polypeptide is encoded by an AC011997.1 gene, the second native polypeptide is encoded by a LRRC69 gene, y is 1, and AxByCz is MAGAPPPASLPPCSLISDCCASNQRDSVGVGPSEPGNNIKICNESASRK (SEQ ID NO: 135) (b) the first native polypeptide is encoded by an EEF1DP3 gene, the second native polypeptide is encoded by a FRY gene, y is 1, and AxByCz is HGWRPFLPVRARSRWNRRLDVTVANGRSWKYGWSLLRVPQVNGIQVLNVSLKSSSNVISY (SEQ ID NO: 136), (c) the first native polypeptide is encoded by a MAD1L1 gene, the second native polypeptide is encoded by a MAFK gene, y is 0, and AxByCz is RLKEVFQTKIQEFRKACYTLTGYQIDITTENQYRLTSLYAEHPGDCLIFKLRVPGSSVLVTVPGL (SEQ ID NO: 137), or (d) the first native polypeptide is encoded by a PPP1R1B gene, the second native polypeptide is encoded by a STARD3 gene, y is 1, and AxByCz is

(SEQ ID NO: 138)

AEVLKVIRQSAGQKTTCGQGLEGPWERPPPLDESERDGGSEDQVEDPALS
ALLLRPRPPRPEVGAHQDEQAAQGADPRLGAQPACRGLPGLLTVPQPEPL
LAPPSAA.

[0010] In embodiments, the isolated neoantigenic peptide comprises a sequence according to Table 1. In embodiments, x+y+z is at most 500, at most 250, at most 150, at most 125, or at most 100 In embodiments, x+y+z is at least 8, at least 50, at least 100, at least 200, or at least 300. In embodiments, z is at most 500, at most 250, at most 150, at most 125, or at most 100. In embodiments, z is at least 8, at least 50, at least 100, at least 200, or at least 300. In embodiments, the isolated neoantigenic peptide is from about 8 to about 500 amino acids in length. In embodiments, the isolated neoantigenic peptide is from about 8 to about 100 amino acids in length. In embodiments, the isolated neoantigenic peptide is from about 8 to about 50 amino acids in length. In embodiments, the isolated neoantigenic peptide is from about 15 to about 35 amino acids in length. In embodiments, the isolated neoantigenic peptide is from about 8 and about 15 amino acids in length. In embodiments, the isolated neoantigenic peptide is from about 8 and about 11 amino acids in length. In embodiments, the isolated neoantigenic peptide is 9 or 10 amino acids in length. In embodiments, the isolated neoantigenic peptide binds major histocompatibility complex (MHC) class I. In embodiments, the isolated neoantigenic peptide binds MHC class I with a binding affinity of about 500 nM or less. In embodiments, the isolated neoantigenic peptide binds MHC class I with a binding affinity of about 250 nM or less. In embodiments, the isolated neoantigenic peptide binds MHC class I with a binding affinity of about 50 nM or less. In embodiments, the isolated neoantigenic peptide is from about 8 and about 30 amino acids in length. In embodiments, the isolated neoantigenic peptide is from about 8 to about 25 amino acids in length. In embodiments, the isolated neoantigenic peptide is from about 15 to about 24 amino acids in length. In embodiments, the isolated neoantigenic peptide is from about 9 to about 15 amino acids in length. In embodiments, the isolated neoantigenic peptide binds MHC class II. In embodiments, the isolated neoantigenic peptide binds MHC class II with a binding affinity of 1000 nM or less. In embodiments, the isolated neoantigenic peptide binds MHC class I with a binding affinity of about 500 nM or less. In embodiments, the isolated neoantigenic peptide further comprises flanking amino acids. In embodiments, the flanking amino acids are not native flanking amino acids In embodiments, the isolated neoantigenic peptide has a total length of at least 8, at least 9, at least 10, at least 11, at least 12, at least 13, at least 14, at least 15, at least 16, at least 17, at least 18, at least 19, at least 20, at least 21, at least 22, at least 23, at least 24, at least 25, at least 26, at least 27, at least 28, at least 29, at least 30, at least 40, at least 50, at least 60, at least 70, at least 80, at least 90, at least 100, at least 150, at least 200, at least 250, at least 300, at least 350, at least 400, at least 450, or at least 500 amino acids. In embodiments, the isolated neoantigenic peptide has a total length of at most 8, at most 9, at most 10, at most 11, at most 12, at most 13, at most 14, at most 15, at most 16, at most 17, at most 18, at most 19, at most 20, at most 21, at most 22, at most 23, at most 24, at most 25, at most 26, at most 27, at most 28, at most 29, at most 30, at most 40, at most 50, at most 60, at most 70, at most 80, at most 90, at most 100, at most 150, at most 200, at most 250, at most 300, at most 350, at most 400, at most 450, or at most 500 amino acids. In embodiments, the isolated neoantigenic peptide is a first neoantigenic peptide linked to at least a second neoantigenic peptide. In embodiments, the isolated neoantigenic peptide is linked to the at least second neoantigenic peptide by a poly-glycine or poly-serine linker. In embodiments, the second neoantigenic peptide binds MHC class I or class II with a binding affinity of less than about 1000 nM. In embodiments, the second neoantigenic peptide binds MHC class I or class II with a binding affinity of less than about 500 nM. In embodiments, isolated neoantigenic peptide and the second neoantigenic peptide bind to human leukocyte antigen (HLA)-A, -B, -C, -DP, -DQ, or -DR. In embodiments, the isolated neoantigenic peptide binds a class I HLA and the second neoantigenic peptide binds a class II HLA. In embodiments, the isolated neoantigenic peptide binds a class II HLA and the second neoantigenic peptide binds a class I HLA. In embodiments, the isolated neoantigenic peptide further comprises a modification which increases in vivo half-life, cellular targeting, antigen uptake, antigen processing, MHC affinity, MHC stability, antigen presentation, or a combination thereof. In embodiments, the modification is conjugation to a carrier protein, conjugation to a ligand, conjugation to an antibody, PEGylation, polysialylation HESylation, recombinant PEG mimetics, Fc fusion, albumin fusion, nanoparticle attachment, nanoparticulate encapsulation, cholesterol fusion, iron fusion, acylation, amidation, glycosylation, side chain oxidation, phosphorylation, biotinylation, the addition of a surface active material, the addition of amino acid mimetics, or the addition of unnatural amino acids. In embodiments, the isolated neoantigenic peptide further comprises a modification which increases cellular targeting to antigen presenting cells. In embodiments, the antigen presenting cells are dendritic cells. In embodiments, the dendritic cells are targeted using DEC205, XCR1, CD197, CD80, CD86, CD123, CD209, CD273, CD283, CD289, CD184, CD85h, CD85j, CD85k, CD85d, CD85g, CD85a, CD141, CD11c, CD83, TSLP receptor, Clec9a, or CD1a marker. In embodiments, the dendritic cells are targeted using the CD141, DEC205, Clec9a, or XCR1 marker. In embodiments, the dendritic cells are autologous cells. In embodiments, one or more of the dendritic cells are bound to a T cell. In embodiments, the T cell is an autologous T cell. In embodiments, the isolated neoantigenic peptide is not a isolated neoantigenic peptide listed in Table 2. In embodiments, the isolated neoantigenic peptide is linked to at least one additional neoantigenic peptide listed in Table 1 or 2.

[0011] Provided herein is an in vivo delivery system comprising an isolated neoantigenic peptide described herein. In embodiments, the delivery system includes cell-penetrating peptides, nanoparticulate encapsulation, virus like particles, liposomes, or any combination thereof. In embodiments, the cell-penetrating peptide is TAT peptide, herpes simplex virus VP22, transportan, Antp, or any combination thereof.

[0012] Provided herein is a cell comprising an isolated neoantigenic peptide described herein. In embodiments, the cell is an antigen presenting cell. In embodiments, the cell is a dendritic cell. In embodiments, the cell is an autologous cell. In embodiments, the cell is bound to a T cell. In embodiments, the T cell is an autologous T cell.

[0013] Provided herein is a composition comprising an isolated neoantigenic peptide described herein.

[0014] In embodiments, the composition comprises at least 2, at least 3, at least 4, at least 5, at least 6, at least 7, at least 8, at least 9, at least 10, at least 11, at least 12, at least 13, at least 14, at least 15, at least 16, at least 17, at least 18, at least 19, at least 20, at least 21, at least 22, at least 23, at least 24, at least 25, at least 26, at least 27, at least 28, at least 29, at least 30, at least 40, at least 50, at least 60, at least 70, at least 80, at least 90, or at least 100 of the isolated neoantigenic peptides comprising a tumor-specific neoepitope according to Table 1 or 2. In embodiments, the composition comprises from about 2 to about 20 neoantigenic peptides, or from about 2 to about 30 neoantigenic peptides. In embodiments, the neoantigen is specific for an individual subject's tumor. In embodiments, the composition further comprises at least 1, at least 2, at least 3, at least 4, at least 5, at least 6, at least 7, at least 8, at least 9, at least 10, at least 11, at least 12, at least 13, at least 14, at least 15, at least 16, at least 17, at least 18, at least 19, at least 20, at least 21, at least 22, at least 23, at least 24, or at least 25, at least 26, at least 27, at least 28, at least 29, at least 30, at least 40, at least 50, at least 60, at least 70, at least 80, at least 90, or at least 100 additional neoantigenic peptides. In embodiments, the composition comprises from about 4 to about 20 additional neoantigenic peptides, from about 4 to about 30 additional neoantigenic peptides. In embodiments, at least one of the additional neoantigenic peptides is specific for an individual subject's tumor. In embodiments, the subject specific neoantigenic peptide is selected by identifying sequence differences between the genome, exome, and/or transcriptome of the subject's tumor sample and the genome, exome, and/or transcriptome of a non-tumor sample. In embodiments, the samples are fresh or formalin-fixed paraffin embedded tumor tissues, freshly isolated cells, or circulating tumor cells. In embodiments, the sequence differences are determined by Next Generation Sequencing.

[0015] Provided herein is an isolated polynucleotide encoding an isolated neoantigenic peptide described herein. In embodiments, the polynucleotide is DNA. In embodiments, the polynucleotide is RNA. In embodiments, the RNA is a self-amplifying RNA. In embodiments, the RNA is modified to increase stability, increase cellular targeting, increase translation efficiency, adjuvanticity, cytosol accessibility, and/or decrease cytotoxicity. In embodiments, the modification is conjugation to a carrier protein, conjugation to a ligand, conjugation to an antibody, codon optimization, increased GC-content, incorporation of modified nucleosides, incorporation of 5′-cap or cap analog, and/or incorporation of an unmasked poly-A sequence.

[0016] Provided herein is a cell comprising the polynucleotide described herein.

[0017] Provided herein is a vector comprising the polynucleotide described herein. In embodiments, the polynucleotide is operably linked to a promoter. In embodiments, the vector is a self-amplifying RNA replicon, plasmid, phage, transposon, cosmid, virus, or virion. In embodiments, the vector is derived from an adeno-associated virus, herpesvirus, lentivirus, or a pseudotype thereof.

[0018] Provided herein is an in vivo delivery system comprising the isolated polynucleotide described herein. In embodiments, the delivery system includes spherical nucleic acids, viruses, virus-like particles, plasmids, bacterial plasmids, or nanoparticles.

[0019] Provided herein is a cell comprising a vector or delivery system described herein. In embodiments, the cell is an antigen presenting cell. In embodiments, the cell is a dendritic cell. In embodiments, the cell is an immature dendritic cell.

[0020] Provided herein is a composition comprising at least one polynucleotide described herein. In embodiments, the composition comprises at least 2, at least 3, at least 4, at least 5, at least 6, at least 7, at least 8, at least 9, at least 10, at least 11, at least 12, at least 13, at least 14, at least 15, at least 16, at least 17, at least 18, at least 19, at least 20, at least 21, at least 22, at least 23, at least 24, at least 25, at least 26, at least 27, at least 28, at least 29, at least 30, at least 40, at least 50, at least 60, at least 70, at least 80, at least 90, or at least 100 of the isolated polynucleotides. In embodiments, the composition comprises from about 2 and about 20 of the isolated polynucleotides, or from about 2 to about 30 of the isolated polynucleotides. In embodiments, the neoantigenic peptides are encoded by a vector comprising one or more of the isolated polynucleotides. In embodiments, the composition further comprises at least 1, at least 2, at least 3, at least 4, at least 5, at least 6, at least 7, at least 8, at least 9, at least 10, at least 11, at least 12, at least 13, at least 14, at least 15, at least 16, at least 17, at least 18, at least 19, at least 20, at least 21, at least 22, at least 23, at least 24, at least 25, at least 26, at least 27, at least 28, at least 29, at least 30, at least 40, at least 50, at least 60, at least 70, at least 80, at least 90, or at least 100 additional neoantigenic polynucleotides encoding for additional neoantigenic peptides. In embodiments, one or more of the additional neoantigenic peptides are encoded by a vector comprising one or more of the additional neoantigenic polynucleotides. In embodiments, the composition comprises from about 4 to about 20 additional neoantigenic polynucleotides, or from about 4 to about 30 additional neoantigenic polynucleotides. In embodiments, the isolated polynucleotides and the additional neoantigenic polynucleotides are linked. In embodiments, the polynucleotides are linked using nucleic acids that encode a poly-glycine or poly-serine linker. In embodiments, at least one of the additional neoantigenic peptide is specific for an individual subject's tumor. In embodiments, the subject specific neoantigenic peptide is selected by identifying sequence differences between the genome, exome, and/or transcriptome of the subject's tumor sample and the genome, exome, and/or transcriptome of a non-tumor sample. In embodiments, the samples are fresh or formalin-fixed paraffin embedded tumor tissues, freshly isolated cells, or circulating tumor cells. In embodiments, the sequence differences are determined by Next Generation Sequencing.

[0021] Provided herein is a T cell receptor (TCR) capable of binding at least one neoantigenic peptide described herein or an MHC-peptide complex comprising at least one neoantigenic peptide described herein. The In embodiments, the MHC of the MHC-peptide is MHC class I or class II. In embodiments, TCR is a bispecific TCR further comprising a domain comprising an antibody or antibody fragment capable of binding an antigen. In embodiments, the antigen is a T cell-specific antigen. In embodiments, the antigen is CD3. In embodiments, the antibody or antibody fragment is an anti-CD3 scFv.

[0022] Provided herein is a chimeric antigen receptor comprising: (i) a T cell activation molecule; (ii) a transmembrane region; and (iii) an antigen recognition moiety capable of binding at least one neoantigenic peptide described herein or an MHC-peptide complex comprising at least one neoantigenic peptide described herein. In embodiments, CD3-zeta is the T cell activation molecule. In embodiments, the chimeric antigen receptor further comprises at least one costimulatory signaling domain. The In embodiments, the signaling domain is CD28, 4-1BB, ICOS, OX40, ITAM, or Fc epsilon RI-gamma. In embodiments, the antigen recognition moiety is capable of binding the isolated neoantigenic peptide in the context of MHC class I or class II. In embodiments, the CD3-zeta, CD28, CTLA-4, ICOS, BTLA, KIR, LAG3, CD137, OX40, CD27, CD40L, Tim-3, A2aR, or PD-1 transmembrane region. In embodiments, the neoantigenic peptide is located in the extracellular domain of a tumor associated polypeptide. In embodiments, the MHC of the MHC-peptide is MHC class I or class II.

[0023] Provided herein is a T cell comprising the T cell receptor or chimeric antigen receptor described herein, optionally wherein the T cell is a helper or cytotoxic T cell. In embodiments, the T cell is a T cell of a subject.

[0024] Provided herein is a T cell comprising a T cell receptor (TCR) capable of binding at least one neoantigenic peptide described herein or an MHC-peptide complex comprising at least one neoantigenic peptide described herein, wherein the T cell is a T cell isolated from a population of T cells from a subject that has been incubated with antigen presenting cells and one or more of the at least one neoantigenic peptide described herein for a sufficient time to activate the T cells. In embodiments, the T cell is a CD8+ T cell, a helper T cell or cytotoxic T cell. In embodiments, the population of T cells from a subject is a population of CD8+ T cells from the subject. In embodiments, the one or more of the at least one neoantigenic peptide described herein is a subject-specific neoantigenic peptide. In embodiments, the subject-specific neoantigenic peptide has a different tumor neo-epitope that is an epitope specific to a tumor of the subject. In embodiments, the subject-specific neoantigenic peptide is an expression product of a tumor-specific non-silent mutation that is not present in a non-tumor sample of the subject. In embodiments, the subject-specific neoantigenic peptide binds to a HLA protein of the subject. In embodiments, the subject-specific neoantigenic peptide binds to a HLA protein of the subject with an IC50 less than 500 nM. In embodiments, the activated CD8+ T cells are separated from the antigen presenting cells. In embodiments, the antigen presenting cells are dendritic cells or CD40L-expanded B cells. In embodiments, the antigen presenting cells are non-transformed cells. In embodiments, the antigen presenting cells are non-infected cells. In embodiments, the antigen presenting cells are autologous. In embodiments, the antigen presenting cells have been treated to strip endogenous MHC-associated peptides from their surface. In embodiments, the treatment to strip the endogenous MHC-associated peptides comprises culturing the cells at about 26° C. In embodiments, the treatment to strip the endogenous MHC-associated peptides comprises treating the cells with a mild acid solution. In embodiments, the antigen presenting cells have been pulsed with at least one neoantigenic peptide described herein. In embodiments, pulsing comprises incubating the antigen presenting cells in the presence of at least about 2 μg/ml of each of the at least one neoantigenic peptide described herein. In embodiments, ratio of isolated T cells to antigen presenting cells is between about 30:1 and 300:1. In embodiments, the incubating the isolated population of T cells is in the presence of IL-2 and IL-7. In embodiments, the MHC of the MHC-peptide is MHC class I or class II.

[0025] Provided herein is a method for activating tumor specific T cells comprising: isolating a population of T cells from a subject; and incubating the isolated population of T cells with antigen presenting cells and at least one neoantigenic peptide described herein for a sufficient time to activate the T cells. In embodiments, the T cell is a CD8+ T cell, a helper T cell or cytotoxic T cell. In embodiments, the population of T cells from a subject is a population of CD8+ T cells from the subject. In embodiments, the one or more of the at least one neoantigenic peptide described herein is a subject-specific neoantigenic peptide. In embodiments, the subject-specific neoantigenic peptide has a different tumor neo-epitope that is an epitope specific to a tumor of the subject. In embodiments, the subject-specific neoantigenic peptide is an expression product of a tumor-specific non-silent mutation that is not present in a non-tumor sample of the subject. In embodiments, the subject-specific neoantigenic peptide binds to a HLA protein of the subject. In embodiments, the subject-specific neoantigenic peptide binds to a HLA protein of the subject with an IC50 less than 500 nM. In embodiments, the method further comprises separating the activated T cells from the antigen presenting cells. In embodiments, the method further comprises testing the activated T cells for evidence of reactivity against at least one of neoantigenic peptide of described herein. In embodiments, the antigen presenting cells are dendritic cells or CD40L-expanded B cells. In embodiments, the antigen presenting cells are non-transformed cells. In embodiments, the antigen presenting cells are non-infected cells. In embodiments, the antigen presenting cells are autologous. In embodiments, the antigen presenting cells have been treated to strip endogenous MHC-associated peptides from their surface. In embodiments, the treatment to strip the endogenous MHC-associated peptides comprises culturing the cells at about 26° C. In embodiments, the treatment to strip the endogenous MHC-associated peptides comprises treating the cells with a mild acid solution. In embodiments, the antigen presenting cells have been pulsed with at least one neoantigenic peptide described herein. In embodiments, pulsing comprises incubating the antigen presenting cells in the presence of at least about 2 μg/ml of each of at least one neoantigenic peptide described herein. In embodiments, ratio of isolated T cells to antigen presenting cells is between about 30:1 and 300:1. In embodiments, the incubating the isolated population of T cells is in the presence of IL-2 and IL-7. In embodiments, the MHC of the MHC-peptide is MHC class I or class II.

[0026] Provided herein is a composition comprising activated tumor specific T cells produced by a method described herein.

[0027] Provided herein is a method of treating cancer in a subject comprising administering to the subject a therapeutically effective amount of activated tumor specific T cell described herein, or produced by a method described herein. In embodiments, the administering comprises administering from about 10⁶ to 10¹², from about 10⁸ to 10¹¹, or from about 10⁹ to 10¹⁰ of the activated tumor specific T cells.

[0028] Provided herein is a nucleic acid comprising a promoter operably linked to a polynucleotide encoding the T cell receptor described herein. In embodiments, the TCR is capable of binding the at least one neoantigenic peptide in the context of major histocompatibility complex (MHC) class I or class II.

[0029] Provided herein is a nucleic acid comprising a promoter operably linked to a polynucleotide encoding the chimeric antigen receptor described herein. In embodiments, the antigen recognition moiety is capable of binding the at least one neoantigenic peptide in the context of major histocompatibility complex (MHC) class I or class II. In embodiments, the neoantigenic peptide is located in the extracellular domain of a tumor associated polypeptide. In embodiments, the nucleic acid comprises the CD3-zeta, CD28, CTLA-4, ICOS, BTLA, KIR, LAG3, CD137, OX40, CD27, CD40L, Tim-3, A2aR, or PD-1 transmembrane region.

[0030] Provided herein is an antibody or antibody fragment capable of binding at least one neoantigenic peptide described herein or an MHC-peptide complex comprising at least one neoantigenic peptide described herein, optionally wherein the antibody fragment is a bi-specific T cell engager (BiTE). In embodiments, the antibody or antibody fragment binds to an extracellular portion of the at least one neoantigenic peptide. In embodiments, the native polypeptide is encoded by a gene selected from the group consisting of: β2M, wherein Cz is RMERELKKWSIQTCLSARTGLSISCTTLNSPPLKKMSMPAV (SEQ ID NO: 53), or LCSRYSLFLAWRLSSVLQRFRFTHVIQQRMESQIS (SEQ ID NO: 54); EGFR, wherein AxByCz is IPVAIKELREATSPKANKEILDEAYVMASVDNPHVCRLLGICLTSTVQLIMQLMPFGCLLDYVREHKD NIGSQYLLNWCVQIAKGMNYLEDRRLVHRDLAA (SEQ ID NO: 12); BTK, wherein AxByCz is MIKEGSMSEDEFIEEAKVMMNLSHEKLVQLYGVCTKQRPIFIITEYMANGSLLNYLREMRHRFQTQQ LLEMCKDVCEAMEYLESKQFLHRDLAARNCLVND (SEQ ID NO: 9); or ESR1, wherein AxByCz is HLMAKAGLTLQQQHQRLAQLLLILSHIRHMSNKGMEHLYSMKCKNVVPLYGLLLEMLDAHRLHAP TSRGGASVEETDQSHLATAGSTSSHSLQKYYITGEA (SEQ ID NO: 14), NQGKCVEGMVEIFDMLLATSSRFRMMNLQGEEFVCLKSIILLNSGVYTFLPSTLKSLEEKDHIHRVLD KITDTLIHLMAKAGLTLQQQHQRLAQLLLILSH (SEQ ID NO: 15), IHLMAKAGLTLQQQHQRLAQLLLILSHIRHMSNKGMEHLYSMKCKNVVPLCDLLLEMLDAHRLHAP TSRGGASVEETDQSHLATAGSTSSHSLQKYYITGE (SEQ ID NO: 16), IHLMAKAGLTLQQQHQRLAQLLLILSHIRHMSNKGMEHLYSMKCKNVVPLNDLLLEMLDAHRLHAP TSRGGASVEETDQSHLATAGSTSSHSLQKYYITGE (SEQ ID NO: 17), or IHLMAKAGLTLQQQHQRLAQLLLILSHIRHMSNKGMEHLYSMKCKNVVPLSDLLLEMLDAHRLHAP TSRGGASVEETDQSHLATAGSTSSHSLQKYYITGE (SEQ ID NO: 18); or HER2, wherein AxByCz is GSGAFGTVYKGIWIPDGENVKIPVAIKVLRENTSPKANKEILDEAYVMAGLGSPYVSRLLGICLTSTV QLVTQLMPYGCLLDHVRENRGRLGSQDLLNWCM (SEQ ID NO: 139). In embodiments, the antibody or antibody fragment is a bispecific antibody or antibody fragment. In embodiments, one antigen binding domain of the bispecific antibody or antibody fragment is an anti-CD3 binding domain.

[0031] Provided herein is a modified cell transfected or transduced with a nucleic acid described herein. In embodiments, the modified cell is a T cell, tumor infiltrating lymphocyte, NK-T cell, TCR-expressing cell, CD4+ T cell, CD8+ T cell, or NK cell.

[0032] Provided herein is a composition comprising the T cell receptor or chimeric antigen receptor described herein.

[0033] Provided herein is a composition comprising autologous subject T cells containing the T cell receptor or chimeric antigen receptor described herein. In embodiments, the composition further comprises an immune checkpoint inhibitor. In embodiments, the composition further comprises at least two immune checkpoint inhibitors. In embodiments, each of the immune checkpoint inhibitors inhibits a checkpoint protein selected from the group consisting of CTLA-4, PDL1, PDL2, PD1, B7-H3, B7-H4, BTLA, HVEM, TIM3, GAL9, LAG3, VISTA, KIR, 2B4, CD160, CGEN-15049, CHK 1, CHK2, A2aR, and B-7 family ligands or a combination thereof. In embodiments, each of the immune checkpoint inhibitors interacts with a ligand of a checkpoint protein selected from the group consisting of CTLA-4, PDL1, PDL2, PD1, B7-H3, B7-H4, BTLA, HVEM, TIM3, GAL9, LAG3, VISTA, KIR, 2B4, CD160, CGEN-15049, CHK 1, CHK2, A2aR, and B-7 family ligands or a combination thereof. In embodiments, the T cells are PD-1 and/or CTLA4 knockout T cells, optionally, wherein the PD-1 and/or CTLA4 knockout T cells are created using a CRISPR system. In embodiments, the composition further comprises an immune modulator or adjuvant. In embodiments, the immune modulator is a co-stimulatory ligand, a TNF ligand, an Ig superfamily ligand, CD28, CD80, CD86, ICOS, CD40L, OX40, CD27, GITR, CD30, DR3, CD69, or 4-1BB. In embodiments, the immune modulator is at least one cancer cell or cancer cell extract. In embodiments, the cancer cell is autologous to the subject in need of the composition. In embodiments, the cancer cell has undergone lysis or been exposed to UV radiation. In embodiments, the composition further comprises an adjuvant. In embodiments, the adjuvant is selected from the group consisting of: Poly(I:C), Poly-ICLC, STING agonist, 1018 ISS, aluminium salts, Amplivax, AS15, BCG, CP-870,893, CpG7909, CyaA, dSLIM, GM-CSF, IC30, IC31, Imiquimod, ImuFact IMP321, IS Patch, ISS, ISCOMATRIX, Juvlmmune, LipoVac, MF59, monophosphoryl lipid A, Montanide IMS 1312 VG, Montanide ISA 206 VG, Montanide ISA 50 V2, Montanide ISA 51 VG, OK-432, OM-174, OM-197-MP-EC, ISA-TLR2 agonist, ONTAK, PepTel®. vector system, PLG microparticles, resiquimod, SRL172, virosomes and other virus-like particles, YF-17D, VEGF trap, R848, beta-glucan, Pam3Cys, Pam3CSK4, acrylic or methacrylic polymers, copolymers of maleic anhydride, and QS21 stimulon. In embodiments, the composition induces a humoral response when administered to a subject. In embodiments, the composition induces a T helper cell type 1 when administered to a subject.

[0034] Provided herein is a method of inhibiting growth of a tumor cell expressing a tumor-specific neoepitope, comprising contacting the tumor cell with the peptide, polynucleotide, delivery system, vector, composition, antibody, or cells described herein.

[0035] Provided herein is a method of prophylaxis of a subject, comprising contacting a cell of the subject with the peptide, polynucleotide, delivery system, vector, composition, antibody, or cells described herein. In embodiments, the native polypeptide is encoded by a gene selected from the group consisting of: β2M, wherein Cz is RMERELKKWSIQTCLSARTGLSISCTTLNSPPLKKMSMPAV (SEQ ID NO: 53), or LCSRYSLFLAWRLSSVLQRFRFTHVIQQRMESQIS (SEQ ID NO: 54); EGFR, wherein AxByCz is IPVAIKELREATSPKANKEILDEAYVMASVDNPHVCRLLGICLTSTVQLIMQLMPFGCLLDYVREHKD NIGSQYLLNWCVQIAKGMNYLEDRRLVHRDLAA (SEQ ID NO: 12); BTK, wherein AxByCz is MIKEGSMSEDEFIEEAKVMMNLSHEKLVQLYGVCTKQRPIFIITEYMANGSLLNYLREMRHRFQTQQ LLEMCKDVCEAMEYLESKQFLHRDLAARNCLVND (SEQ ID NO: 9); or ESR1, wherein AxByCz is HLMAKAGLTLQQQHQRLAQLLLILSHIRHMSNKGMEHLYSMKCKNVVPLYGLLLEMLDAHRLHAP TSRGGASVEETDQSHLATAGSTSSHSLQKYYITGEA (SEQ ID NO: 14), NQGKCVEGMVEIFDMLLATSSRFRMMNLQGEEFVCLKSIILLNSGVYTFLPSTLKSLEEKDHIHRVLD KITDTLIHLMAKAGLTLQQQHQRLAQLLLILSH (SEQ ID NO: 15), IHLMAKAGLTLQQQHQRLAQLLLILSHIRHMSNKGMEHLYSMKCKNVVPLCDLLLEMLDAHRLHAP TSRGGASVEETDQSHLATAGSTSSHSLQKYYITGE (SEQ ID NO: 16), IHLMAKAGLTLQQQHQRLAQLLLILSHIRHMSNKGMEHLYSMKCKNVVPLNDLLLEMLDAHRLHAP TSRGGASVEETDQSHLATAGSTSSHSLQKYYITGE (SEQ ID NO: 17), or IHLMAKAGLTLQQQHQRLAQLLLILSHIRHMSNKGMEHLYSMKCKNVVPLSDLLLEMLDAHRLHAP TSRGGASVEETDQSHLATAGSTSSHSLQKYYITGE (SEQ ID NO: 18); and HER2, wherein AxByCz is GSGAFGTVYKGIWIPDGENVKIPVAIKVLRENTSPKANKEILDEAYVMAGLGSPYVSRLLGICLTSTV QLVTQLMPYGCLLDHVRENRGRLGSQDLLNWCM (SEQ ID NO: 139).

[0036] Provided herein is a method of treating cancer or initiating, enhancing, or prolonging an anti-tumor response in a subject in need thereof comprising administering to the subject the peptide, polynucleotide, vector, composition, antibody, or cells described herein. In embodiments, the subject is a human. In embodiments, the subject has cancer. In embodiments, the cancer is selected from the group consisting of urogenital, gynecological, lung, gastrointestinal, head and neck cancer, malignant glioblastoma, malignant mesothelioma, non-metastatic or metastatic breast cancer, malignant melanoma, Merkel Cell Carcinoma or bone and soft tissue sarcomas, haematologic neoplasias, multiple myeloma, acute myelogenous leukemia, chronic myelogenous leukemia, myelodysplastic syndrome and acute lymphoblastic leukemia, non-small cell lung cancer (NSCLC), breast cancer, metastatic colorectal cancers, hormone sensitive or hormone refractory prostate cancer, colorectal cancer, ovarian cancer, hepatocellular cancer, renal cell cancer, pancreatic cancer, gastric cancer, oesophageal cancers, hepatocellular cancers, cholangiocellular cancers, head and neck squamous cell cancer soft tissue sarcoma, and small cell lung cancer. In embodiments, the peptide, polynucleotide, vector, composition, antibody, or cells described herein is for use in treating a corresponding cancer according to Table 1 or Table 2. In embodiments, the peptide, polynucleotide, vector, composition, antibody, or cells described herein is for use in treating a subject with an HLA type that is a corresponding HLA type according to Table 1 or Table 2. In embodiments, the subject has undergone surgical removal of the tumor. In embodiments, the peptide, polynucleotide, vector, composition, or cells is administered via intravenous, intraperitoneal, intratumoral, intradermal, or subcutaneous administration. In embodiments, the peptide, polynucleotide, vector, composition, or cells is administered into an anatomic site that drains into a lymph node basin. In embodiments, administration is into multiple lymph node basins. In embodiments, administration is by a subcutaneous or intradermal route. In embodiments, peptide is administered. In embodiments, administration is intratumorally. In embodiments, polynucleotide, optionally RNA, is administered. In embodiments, the polynucleotide is administered intravenously. In embodiments, the cell is a T cell or dendritic cell. In embodiments, the peptide or polynucleotide comprises an antigen presenting cell targeting moiety. In embodiments, the cell is an autologous cell. In embodiments, the method further comprises administering at least one immune checkpoint inhibitor to the subject. In embodiments, the checkpoint inhibitor is a biologic therapeutic or a small molecule. In embodiments, the checkpoint inhibitor is selected from the group consisting of a monoclonal antibody, a humanized antibody, a fully human antibody and a fusion protein or a combination thereof. In embodiments, the checkpoint inhibitors is a PD-1 antibody or a PD-L1 antibody. In embodiments, the checkpoint inhibitor is selected from the group consisting of ipilimumab, tremelimumab, nivolumab, avelumab, durvalumab, atezolizumab, pembrolizumab, and any combination thereof. In embodiments, the checkpoint inhibitor inhibits a checkpoint protein selected from the group consisting of CTLA-4, PDL1, PDL2, PD1, B7-H3, B7-H4, BTLA, HVEM, TIM3, GAL9, LAG3, VISTA, KIR, 2B4, CD160, CGEN-15049, CHK 1, CHK2, A2aR, and B-7 family ligands, and any combination thereof. In embodiments, the checkpoint inhibitor interacts with a ligand of a checkpoint protein selected from the group consisting of CTLA-4, PDL1, PDL2, PD1, B7-H3, B7-H4, BTLA, HVEM, TIM3, GAL9, LAG3, VISTA, KIR, 2B4, CD160, CGEN-15049, CHK 1, CHK2, A2aR, and B-7 family ligands or a combination thereof. In embodiments, two or more checkpoint inhibitors are administered. In embodiments, at least one of the two or more checkpoint inhibitors is a PD-1 antibody or a PD-L1 antibody. In embodiments, at least one of the two or more checkpoint inhibitors is selected from the group consisting of ipilimumab, tremelimumab, nivolumab, avelumab, durvalumab, atezolizumab, and pembrolizumab. In embodiments, the checkpoint inhibitor and the composition are administered simultaneously or sequentially in any order. In embodiments, the peptide, polynucleotide, vector, composition, or cells is administered prior to the checkpoint inhibitor. In embodiments, the peptide, polynucleotide, vector, composition, or cells is administered after the checkpoint inhibitor. In embodiments, administration of the checkpoint inhibitor is continued throughout neoantigen peptide, polynucleotide, vector, composition, or cell therapy. In embodiments, the neoantigen peptide, polynucleotide, vector, composition, or cell therapy is administered to subjects that only partially respond or do not respond to checkpoint inhibitor therapy. In embodiments, the composition is administered intravenously or subcutaneously. In embodiments, the checkpoint inhibitor is administered intravenously or subcutaneously. In embodiments, the checkpoint inhibitor is administered subcutaneously within about 2 cm of the site of administration of the composition. In embodiments, the composition is administered into the same draining lymph node as the checkpoint inhibitor. In embodiments, the method further comprises administering an additional therapeutic agent to the subject either prior to, simultaneously with, or after treatment with the peptide, polynucleotide, vector, composition, or cells. In embodiments, the additional agent is a chemotherapeutic agent, an immunomodulatory drug, an immune metabolism modifying drug, a targeted therapy, radiation an anti-angiogenesis agent, or an agent that reduces immune-suppression. In embodiments, the chemotherapeutic agent is an alkylating agent, a topoisomerase inhibitor, an anti-metabolite, or an anti-mitotic agent. In embodiments, the additional agent is an anti-glucocorticoid induced tumor necrosis factor family receptor (GITR) agonistic antibody or antibody fragment, ibrutinib, docetaxeol, cisplatin, a CD40 agonistic antibody or antibody fragment, an IDO inhibitor, or cyclophosphamide. In embodiments, the method elicits a CD4+ T cell immune response or a CD8+ T cell immune response. In embodiments, the method elicits a CD4+ T cell immune response and a CD8+ T cell immune response.

[0037] Provided herein is a method for stimulating an immune response in a subject, comprising administering an effective amount of modified cells or composition described herein. In embodiments, the immune response is cytotoxic and/or humoral immune response. In embodiments, the method stimulates a T cell-mediated immune response in a subject. In embodiments, the T cell-mediated immune response is directed against a target cell. In embodiments, the target cell is a tumor cell. In embodiments, the modified cells are transfected or transduced in vivo. In embodiments, the modified cells are transfected or transduced ex vivo. In embodiments, the modified cells are autologous subject T cells. In embodiments, the autologous subject T cells are obtained from a subject that has received a neoantigen peptide or nucleic acid vaccine. In embodiments, the neoantigen peptide or nucleic acid vaccine comprises at least one personalized neoantigen. In embodiments, the neoantigen peptide or nucleic acid vaccine comprises at least one additional neoantigenic peptide listed in Table 1 or 2. In embodiments, the subject received a chemotherapeutic agent, an immunomodulatory drug, an immune metabolism modifying drug, targeted therapy or radiation prior to and/or during receipt of the neoantigen peptide or nucleic acid vaccine. In embodiments, the subject receives treatment with at least one checkpoint inhibitor. In embodiments, the autologous T cells are obtained from a subject that has already received at least one round of T cell therapy containing a neoantigen. In embodiments, the method further comprises adoptive T cell therapy. In embodiments, the adoptive T cell therapy comprises autologous T cells. In embodiments, the autologous T cells are targeted against tumor antigens. In embodiments, the adoptive T cell therapy further comprises allogenic T cells. In embodiments, the allogenic T cells are targeted against tumor antigens. In embodiments, the adoptive T cell therapy is administered before the checkpoint inhibitor, after the checkpoint inhibitor, or simultaneously with the checkpoint inhibitor.

[0038] Provided herein is a method for evaluating the efficacy of any of the cells described herein, comprising: (i) measuring the number or concentration of target cells in a first sample obtained from the subject before administering the modified cell, (ii) measuring the number concentration of target cells in a second sample obtained from the subject after administration of the modified cell, and (iii) determining an increase or decrease of the number or concentration of target cells in the second sample compared to the number or concentration of target cells in the first sample. In embodiments, treatment efficacy is determined by monitoring a clinical outcome; an increase, enhancement or prolongation of anti-tumor activity by T cells; an increase in the number of anti-tumor T cells or activated T cells as compared with the number prior to treatment; B cell activity; CD4+ T cell activity; or a combination thereof. In embodiments, treatment efficacy is determined by monitoring a biomarker. In embodiments, the biomarker is selected from the group consisting of CEA, Her-2/neu, bladder tumor antigen, thyroglobulin, alpha-fetoprotein, PSA, CA 125, CA19.9, CA 15.3, leptin, prolactin, osteopontin, IGF-II, CD98, fascin, sPIgR, 14-3-3 eta, troponin I, circulating tumor cell RNA or DNA, and b-type natriuretic peptide. In embodiments, clinical outcome is selected from the group consisting of tumor regression; tumor shrinkage; tumor necrosis; anti-tumor response by the immune system; tumor expansion, recurrence or spread; or a combination thereof. In embodiments, the treatment effect is predicted by presence of T cells or by presence of a gene signature indicating T cell inflammation or a combination thereof.

[0039] Provided herein is a method of treating cancer or initiating, enhancing, or prolonging an anti-tumor response in a subject in need thereof comprising administering to the subject: the peptide, polynucleotide, vector, composition, antibody, or cells described herein; and at least one checkpoint inhibitor. In embodiments, the method further comprises administration of an immunomodulator or adjuvant. In embodiments, the immunomodulator or adjuvant is selected from the group consisting of Poly(I:C), Poly-ICLC, STING agonist, 1018 ISS, aluminium salts, Amplivax, AS15, BCG, CP-870,893, CpG7909, CyaA, dSLIM, GM-CSF, IC30, IC31, Imiquimod, ImuFact IMP321, IS Patch, ISS, ISCOMATRIX, Juvlmmune, LipoVac, MF59, monophosphoryl lipid A, Montanide IMS 1312 VG, Montanide ISA 206 VG, Montanide ISA 50 V2, Montanide ISA 51 VG, OK-432, OM-174, OM-197-MP-EC, ISA-TLR2 agonist, ONTAK, PepTel® vector system, PLG microparticles, resiquimod, SRL172, virosomes and other virus-like particles, YF-17D, VEGF trap, R848, beta-glucan, Pam3Cys, Pam3CSK4, acrylic or methacrylic polymers, copolymers of maleic anhydride, and QS21 stimulon. a co-stimulatory ligand, a TNF ligand, an Ig superfamily ligand, CD28, CD80, CD86, ICOS, CD40L, OX40, CD27, GITR, CD30, DR3, CD69, or 4-1BB. In embodiments, the immunomodulator or adjuvant is Poly-ICLC. In embodiments, the checkpoint inhibitor is an anti-PD1 antibody or antibody fragment. In embodiments, the anti-PD1 antibody or antibody fragment is nivolumab or pembolizumab. In embodiments, the checkpoint inhibitor is an anti-PD-L1 antibody or antibody fragment. In embodiments, the anti-PD-L1 antibody or antibody fragment is avelumab, durvalumab or atezolizumab. In embodiments, the checkpoint inhibitor is an anti-CTLA4 antibody or antibody fragment. In embodiments, the anti-CTLA4 antibody is ipilimumab or tremelimumab. In embodiments, the method comprises administering both an anti-PD1 antibody and an anti-CTLA4 antibody. In embodiments, administration of the checkpoint inhibitor is initiated before initiation of administration of the peptide, polynucleotide, vector, composition, antibody, or cell. In embodiments, administration of the checkpoint inhibitor is initiated after initiation of administration of the peptide, polynucleotide, vector, composition, antibody, or cell. In embodiments, administration of the checkpoint inhibitor is initiated simultaneously with the initiation of administration of the peptide, polynucleotide, vector, composition, antibody, or cell. In embodiments, the peptide, polynucleotide, vector, composition, antibody, or cell is administered intravenously or subcutaneously. In embodiments, the checkpoint inhibitor is administered intravenously or subcutaneously. In embodiments, the checkpoint inhibitor is administered subcutaneously within about 2 cm of the site of administration of the peptide, polynucleotide, vector, composition, antibody, or cell. In embodiments, the peptide, polynucleotide, vector, composition, antibody, or cell is administered into the same draining lymph node as the checkpoint inhibitor.

[0040] Provided herein is a kit comprising the peptide, polynucleotide, vector, composition, antibody, cells, or composition described herein. In embodiments, the cancer is selected from the group consisting of: adrenal, bladder, breast, cervical, colorectal, glioblasoma, head and neck, kidney chromophobe, kidney clear cell, kidney papillary, liver, lung adenocarcinoma, lung squamous, ovarian, pancreatic, melanoma, stomach, uterine corpus endometrial, and uterine carcinosarcoma. In embodiments, the cancer is selected from the group consisting of: prostate cancer, bladder, lung squamous, NSCLC, breast, head and neck, lung adenocarcinoma, GBM, Glioma, CML, AML, supretentorial ependyomas, acute promyelocytic leukemia, solitary fibrous tumors, and crizotinib resistant cancer. In embodiments, the cancer is selected from the group consisting of: CRC, head and neck, stomach, lung squamous, lung adenocarcinoma, Prostate, Bladder. stomach, renal cell carcinoma, and uterine. In embodiments, the cancer is selected from the group consisting of: melanoma, lung squamous, DLBCL, uterine, head and neck, uterine, liver, and CRC. In embodiments, the cancer is selected from the group consisting of: lymphoid cancer, Burkitt lymphoma, neuroblastoma, prostate adenocarcinoma, colorectal adenocarcinoma; Uterine/Endometrium Adenocarcinoma; MSI+; endometrium serous carcinoma; endometrium carcinosarcoma-malignant mesodermal mixed tumour, glioma; astrocytoma; GBM, acute myeloid leukaemia associated with MDS; chronic lymphocytic leukaemia-small lymphocytic lymphoma; myelodysplastic syndrome; acute myeloid leukaemia; luminal NS carcinoma of breast; chronic myeloid leukaemia; ductal carcinoma of pancreas; chronic myelomonocytic leukaemia; myelofibrosis; myelodysplastic syndrome; prostate adenocarcinoma; essential thrombocythaemia; and medullomyoblastoma. In embodiments, the cancer is selected from the group consisting of: colorectal, uterine, endometrial, and stomach. In embodiments, the cancer is selected from the group consisting of: cervical, head and neck, anal, stomach, Burkitt's lymphoma, and nasopharyngeal carcinoma. In embodiments, the cancer is selected from the group consisting of: bladder, colorectal, and stomach. In embodiments, the cancer is selected from the group consisting of: lung, CRC, melanoma, breast, NSCLC, and CLL. In embodiments, the subject is a partial or non-responder to checkpoint inhibitor therapy. In embodiments, the cancer is selected from the group consisting of: bladder urothelial carcinoma (BLCA), breast invasive carcinoma (BRCA), breast cancer, cervical squamous cell carcinoma and endocervical adenocarcinoma (CESC), chronic lymphocytic leukaemia (CLL), colorectal cancer (CRC), glioblastoma multiforme (GBM), head and neck squamous cell carcinoma (HNSC), kidney renal papillary cell carcinoma (KIRP), liver hepatocellular carcinoma (LIHC), lung adenocarcinoma (LUAD), lung squamous cell carcinoma (LUSC), pancreatic adenocarcinoma (PAAD), Prostate Cancer, skin cutaneous melanoma (SKCM), stomach adenocarcinoma (STAD), thyroid adenocarcinoma (THCA), and uterine corpus endometrioid carcinoma (UCEC). In embodiments, the cancer is selected from the group consisting of: colorectal cancer, uterine cancer, endometrium cancer, stomach cancer, and Lynch syndrome. In embodiments, the cancer is an MSI+ cancer.

[0041] The present invention is directed to an isolated neoantigenic peptide comprising a tumor-specific neoepitope defined in Table 1, wherein the isolated neoantigenic peptide is not a native polypeptide. The present invention is also directed to an isolated neoantigenic peptide which comprises a tumor-specific neoepitope and is defined in Table 1.

[0042] In some embodiments, the isolated neoantigenic peptide is between about 8 to about 50 amino acids in length. In another embodiment, the isolated neoantigenic peptide is between about 15 to about 35 amino acids in length. In another embodiment, the isolated neoantigenic peptide is about 15 amino acids or less in length. In another embodiment, the isolated neoantigenic peptide is between about 8 and about 11 amino acids in length. In another embodiment, the isolated neoantigenic peptide is 9 or 10 amino acids in length. In another embodiment, the isolated neoantigenic peptide binds major histocompatibility complex (MHC) class I. In another embodiment, the isolated neoantigenic peptide binds MHC class I with a binding affinity of less than about 500 nM.

[0043] In some embodiments, the isolated neoantigenic peptide is about 30 amino acids or less in length. In another embodiment, the isolated neoantigenic peptide is between about 6 and about 25 amino acids in length. In another embodiment, the isolated neoantigenic peptide is between about 15 and about 24 amino acids in length. In another embodiment, the isolated neoantigenic peptide is between about 9 and about 15 amino acids in length. In another embodiment, the isolated neoantigenic peptide binds MHC class II. In another embodiment, the isolated neoantigenic peptide binds MHC class II with a binding affinity of less than about 1000 nM.

[0044] In some embodiments, the isolated neoantigenic peptide further comprises flanking amino acids. In another embodiment, the flanking amino acids are not native flanking amino acids. In another embodiment, the isolated neoantigenic peptide is linked to at least a second neoantigenic peptide. In another embodiment, the peptides are linked using a poly-glycine or poly-serine linker. In another embodiment, the second neoantigenic peptide binds MHC class I or class II with a binding affinity of less than about 1000 nM. In another embodiment, the second neoantigenic peptide binds MHC class I or class II with a binding affinity of less than about 500 nM. In another embodiment, both of the neoepitopes bind to human leukocyte antigen (HLA)-A, -B, -C, -DP, -DQ, or -DR. In another embodiment, the isolated neoantigenic peptide binds a class I HLA and the second neoantigenic peptide binds a class II HLA. In another embodiment, the isolated neoantigenic peptide binds a class II HLA and the second neoantigenic peptide binds a class I HLA.

[0045] In some embodiments, the isolated neoantigenic peptide further comprises modifications which increase in vivo half-life, cellular targeting, antigen uptake, antigen processing, MHC affinity, MHC stability, or antigen presentation. In another embodiment, the modification is conjugation to a carrier protein, conjugation to a ligand, conjugation to an antibody, PEGylation, polysialylation HESylation, recombinant PEG mimetics, Fc fusion, albumin fusion, nanoparticle attachment, nanoparticulate encapsulation, cholesterol fusion, iron fusion, acylation, amidation, glycosylation, side chain oxidation, phosphorylation, biotinylation, the addition of a surface active material, the addition of amino acid mimetics, or the addition of unnatural amino acids. In another embodiment, the cells that are targeted are antigen presenting cells. In another embodiment, the antigen presenting cells are dendritic cells. In another embodiment, the dendritic cells are targeted using DEC205, XCR1, CD197, CD80, CD86, CD123, CD209, CD273, CD283, CD289, CD184, CD85h, CD85j, CD85k, CD85d, CD85g, CD85a, CD141, CD11c, CD83, TSLP receptor, Clec9a or CD1a marker. In another embodiment, the dendritic cells are targeted using the CD141, DEC205, or XCR1 marker.

[0046] In some embodiments, the invention provides an in vivo delivery system comprising an isolated neoantigenic peptide described herein. In another embodiment, the delivery system includes cell-penetrating peptides, nanoparticulate encapsulation, virus like particles, or liposomes. In another embodiment, the cell-penetrating peptide is TAT peptide, herpes simplex virus VP22, transportan, or Antp.

[0047] In some embodiments, the invention is directed to a cell comprising an isolated neoantigenic peptide described herein. In another embodiment, the cell is an antigen presenting cell. In another embodiment, the cell is a dendritic cell.

[0048] In some embodiments, the invention is directed to a composition comprising an isolated neoantigenic peptide described herein. In another embodiment, the composition comprises at least 2, at least 3, at least 4, at least 5, at least 6, at least 7, at least 8, at least 9, at least 10, at least 11, at least 12, at least 13, at least 14, at least 15, at least 16, at least 17, at least 18, at least 19, at least 20, at least 21, at least 22, at least 23, at least 24, at least 25, at least 26, at least 27, at least 28, at least 29, or at least 30 of the isolated neoantigenic peptides comprising a tumor-specific neoepitope defined in Table 1 or 2. In another embodiment, the composition comprises between 2 and 20 neoantigenic peptides. In another embodiment, the composition further comprises at least 1, at least 2, at least 3, at least 4, at least 5, at least 6, at least 7, at least 8, at least 9, at least 10, at least 11, at least 12, at least 13, at least 14, at least 15, at least 16, at least 17, at least 18, at least 19, at least 20, at least 21, at least 22, at least 23, at least 24, or at least 25, at least 26, at least 27, at least 28, at least 29, or at least 30 additional neoantigenic peptides. In another embodiment, the composition comprises between about 4 and about 20 additional neoantigenic peptides. In another embodiment, the additional neoantigenic peptide is specific for an individual patient's tumor. In another embodiment, the patient specific neoantigenic peptide is selected by identifying sequence differences between the genome, exome, and/or transcriptome of the patient's tumor sample and the genome, exome, and/or transcriptome of a non-tumor sample. In another embodiment, the samples are fresh or formalin-fixed paraffin embedded tumor tissues, freshly isolated cells, or circulating tumor cells. In another embodiment, the sequence differences are determined by Next Generation Sequencing.

[0049] In some embodiments, the invention is directed to an isolated polynucleotide encoding an isolated neoantigenic peptide described herein. In another embodiment, the isolated polynucleotide is RNA, optionally a self-amplifying RNA. In another embodiment, the RNA is modified to increase stability, increase cellular targeting, increase translation efficiency, adjuvanticity, cytosol accessibility, and/or decrease cytotoxicity. In another embodiment, the modification is conjugation to a carrier protein, conjugation to a ligand, conjugation to an antibody, codon optimization, increased GC-content, incorporation of modified nucleosides, incorporation of 5′-cap or cap analog, and/or incorporation of an unmasked poly-A sequence.

[0050] In some embodiments, the invention is directed to a cell comprising a polynucleotide described herein.

[0051] In some embodiments, the invention is directed to a vector comprising a polynucleotide described herein. In another embodiment, the polynucleotide is operably linked to a promoter. In another embodiment, the vector comprises a self-amplifying RNA replicon, plasmid, phage, transposon, cosmid, virus, or virion. In another embodiment, the vector is an adeno-associated virus, herpesvirus, lentivirus, or pseudotypes thereof.

[0052] In some embodiments, the invention is directed to an in vivo delivery system comprising an isolated polynucleotide described herein. In another embodiment, the delivery system includes spherical nucleic acids, viruses, virus-like particles, plasmids, bacterial plasmids, or nanoparticles.

[0053] In some embodiments, the invention is directed to a cell comprising a vector or delivery system described herein. In another embodiment, the cell is an antigen presenting cell. In another embodiment, the cell is a dendritic cell. In another embodiment, the cell is an immature dendritic cell.

[0054] In some embodiments, the invention is directed to a composition comprising at least one polynucleotide described herein. In another embodiment, the composition comprises at least 2, at least 3, at least 4, at least 5, at least 6, at least 7, at least 8, at least 9, at least 10, at least 11, at least 12, at least 13, at least 14, at least 15, at least 16, at least 17, at least 18, at least 19, at least 20, at least 21, at least 22, at least 23, at least 24, at least 25, at least 26, at least 27, at least 28, at least 29, or at least 30 of the isolated polynucleotides. In another embodiment, the composition comprises between about 2 and about 20 polynucleotides that encode neoantigenic peptides. In another embodiment, the composition further comprises at least 1, at least 2, at least 3, at least 4, at least 5, at least 6, at least 7, at least 8, at least 9, at least 10, at least 11, at least 12, at least 13, at least 14, at least 15, at least 16, at least 17, at least 18, at least 19, at least 20, at least 21, at least 22, at least 23, at least 24, at least 25, at least 26, at least 27, at least 28, at least 29, or at least 30 additional neoantigenic polynucleotides encoding for additional neoantigenic peptides. In some embodiments, the composition comprises between about 4 and about 20 additional neoantigenic polynucleotides. In some embodiments, the isolated polynucleotides and the additional neoantigenic polynucleotides are linked. In some embodiments, the polynucleotides are linked using nucleic acids that encode a poly-glycine or poly-serine linker. In some embodiments, at least one of the additional neoantigenic peptide is specific for an individual patient's tumor. In some embodiments, the patient specific neoantigenic peptide is selected by identifying sequence differences between the genome, exome, and/or transcriptome of the patient's tumor sample and the genome, exome, and/or transcriptome of a non-tumor sample. In some embodiments, the samples are fresh or formalin-fixed paraffin embedded tumor tissues, freshly isolated cells, or circulating tumor cells. In some embodiments, the sequence differences are determined by Next Generation Sequencing.

[0055] In some embodiments, the invention is directed to a T cell receptor (TCR) capable of binding at least one neoantigenic peptide described herein. In some embodiments, the TCR is capable of binding the isolated neoantigenic peptide in the context of MHC class I or class II.

[0056] In some embodiments, the invention is directed to a chimeric antigen receptor comprising: (i) a T cell activation molecule; (ii) a transmembrane region; and (iii) an antigen recognition moiety capable of binding an isolated neoantigenic peptide described herein. In some embodiments, the chimeric antigen receptor contains CD3-zeta as the T cell activation molecule. In some embodiments, the chimeric antigen receptor further comprises at least one costimulatory signaling domain. In some embodiments, the signaling domain is CD28, 4-1BB, ICOS, OX40, ITAM, or Fc epsilon RI-gamma. In some embodiments, the antigen recognition moiety is capable of binding the isolated neoantigenic peptide in the context of MHC class I or class II. In some embodiments, the chimeric antigen receptor comprises the CD3-zeta, CD28, CTLA-4, ICOS, BTLA, KIR, LAG3, CD137, OX40, CD27, CD40L, Tim-3, A2aR, or PD-1 transmembrane region. In some embodiments, the tumor-specific epitope is located in the extracellular domain of a tumor associated polypeptide.

[0057] In some embodiments, the invention is directed to a T cell comprising the T cell receptor or chimeric antigen receptor described herein. In some embodiments, the T cell is a helper or cytotoxic T cell.

[0058] In some embodiments, the invention is directed to a nucleic acid comprising a promoter operably linked to a polynucleotide encoding a T cell receptor described herein. In some embodiments, the TCR is capable of binding the at least one neoantigenic peptide in the context of major histocompatibility complex (MHC) class I or class II. In another embodiment, the nucleic acid comprises a promoter operably linked to a polynucleotide encoding a chimeric antigen receptor described herein. In another embodiment, the antigen recognition moiety is capable of binding the at least one neoantigenic peptide in the context of major histocompatibility complex (MHC) class I or class II. In some embodiments, the tumor-specific epitope is located in the extracellular domain of a tumor associated polypeptide. In some embodiments, the nucleic acid comprises the CD3-zeta, CD28, CTLA-4, ICOS, BTLA, KIR, LAG3, CD137, OX40, CD27, CD40L, Tim-3, A2aR, or PD-1 transmembrane region.

[0059] In some embodiments, the invention is directed to an antibody capable of binding at least one neoantigenic peptide described herein.

[0060] In some embodiments, the invention is directed to a modified cell transfected or transduced with a nucleic acid described herein. In some embodiments, the modified cell is a T cell, tumor infiltrating lymphocyte, NK-T cell, TCR-expressing cell, CD4⁺ T cell, CD8⁺ T cell, or NK cell.

[0061] In some embodiments, the invention is directed to a composition comprising a T cell receptor or chimeric antigen receptor described herein. In some embodiments, the composition comprises autologous patient T cells containing a T cell receptor or chimeric antigen receptor. In some embodiments, the composition further comprises an immune checkpoint inhibitor. In some embodiments, the composition further comprises at least two immune checkpoint inhibitors. In some embodiments, each of the immune checkpoint inhibitors inhibits a checkpoint protein selected from the group consisting of CTLA-4, PDL1, PDL2, PD1, B7-H3, B7-H4, BTLA, HVEM, TIM3, GAL9, LAG3, VISTA, KIR, 2B4, CD160, CGEN-15049, CHK 1, CHK2, A2aR, and B-7 family ligands or a combination thereof. In some embodiments, each of the immune checkpoint inhibitors interacts with a ligand of a checkpoint protein selected from the group consisting of CTLA-4, PDL1, PDL2, PD1, B7-H3, B7-H4, BTLA, HVEM, TIM3, GAL9, LAG3, VISTA, KIR, 2B4, CD160, CGEN-15049, CHK 1, CHK2, A2aR, and B-7 family ligands or a combination thereof.

[0062] In some embodiments, the composition further comprises an immune modulator or adjuvant. In another embodiment, the immune modulator is a co-stimulatory ligand, a TNF ligand, an Ig superfamily ligand, CD28, CD80, CD86, ICOS, CD40L, OX40, CD27, GITR, CD30, DR3, CD69, or 4-1BB. In another embodiment, the immune modulator is at least one cancer cell or cancer cell extract. In another embodiment, the cancer cell is autologous to the subject in need of the composition. In another embodiment, the cancer cell has undergone lysis or been exposed to UV radiation. In another embodiment, the adjuvant induces a humoral when administered to a subject. In another embodiment, the adjuvant induces a T helper cell type 1 when administered to a subject.

[0063] In some embodiments, the invention is directed to a method of inhibiting growth of a tumor cell expressing a tumor-specific neoepitope described herein, comprising contacting the tumor cell with the peptide, polynucleotide, delivery system, vector, composition, antibody, or cells of the invention.

[0064] In some embodiments, the invention is directed to a method of treating cancer or initiating, enhancing, or prolonging an anti-tumor response in a subject in need thereof comprising administering to the subject the peptide, polynucleotide, vector, composition, antibody, or cells described herein.

[0065] In some embodiments, the cancer is selected from adrenal, bladder, breast, cervical, colorectal, glioblasoma, head and neck, kidney chromophobe, kidney clear cell, kidney papillary, liver, lung adeno, lung squamous, ovarian, pancreatic, melanoma, stomach, uterine corpus endometrial, and uterine carcinosarcoma.

[0066] In some embodiments, the cancer is selected from the group of: prostate cancer, bladder, lung squamous, NSCLC, breast, head and neck, lung adenocarcinoma, GBM, Glioma, CML, AML, supretentorial ependyomas, acute promyelocytic leukemia, solitary fibrous tumors, and crizotinib resistant cancer.

[0067] In some embodiments, the cancer is selected from the group consisting of CRC, head and neck, stomach, lung squamous, lung adeno., Prostate, Bladder. stomach, renal cell carcinoma, and uterine.

[0068] In some embodiments, the cancer is selected from the group consisting of melanoma, lung squamous, DLBCL, uterine, head and neck, uterine, liver, and CRC.

[0069] In some embodiments, the cancer is selected from the group consisting of lymphoid cancer, Burkitt lymphoma, neuroblastoma, prostate adenocarcinoma, colorectal adenocarcinoma; Uterine/Endometrium Adenocarcinoma; MSI⁺; endometrium serous carcinoma; endometrium carcinosarcoma-malignant mesodermal mixed tumour; glioma; astrocytoma; GBM, acute myeloid leukaemia associated with MDS; chronic lymphocytic leukaemia-small lymphocytic lymphoma; myelodysplastic syndrome; acute myeloid leukaemia; luminal NS carcinoma of breast; chronic myeloid leukaemia; ductal carcinoma of pancreas; chronic myelomonocytic leukaemia; myelofibrosis; myelodysplastic syndrome; prostate adenocarcinoma; essential thrombocythaemia; and medullomyoblastoma.

[0070] In some embodiments, the cancer is selected from the group consisting of colorectal, uterine, endometrial, and stomach.

[0071] In some embodiments, the cancer is selected from the group consisting of cervical, head and neck, anal, stomach, Burkitt's lymphoma, and nasopharyngeal carcinoma.

[0072] In some embodiments, the cancer is selected from the group consisting of bladder, colorectal, and stomach.

[0073] In some embodiments, the cancer is selected from the group consisting of lung, CRC, melanoma, breast, NSCLC, and CLL.

[0074] In some embodiments, the cancer is selected from the group consisting of adrenocortical carcinoma (ACC), acute promyelocytic leukemia, acute myeloid leukemia (AML), AML associated with myelodysplastic syndromes (MDS), anal cancer, astrocytoma, bladder cancer, bladder urothelial carcinoma (BLCA), breast cancer, breast invasive carcinoma (BRCA), Burkitt's Lymphoma, castration-resistant prostate cancer, cervical cancer, cervical squamous cell carcinoma and endocervical adenocarcinoma (CESC), chronic lymphocytic leukaemia-small lymphocytic lymphoma, chronic lymphocytic leukaemia (CLL), chronic myeloid leukaemia (CML), chronic myelomonocytic leukaemia, colorectal adenocarcinoma, colorectal cancer (CRC), Crizotinib resistant non-small cell lung cancer (NSCLC), diffuse large B-cell lymphoma (DLBCL), ductal carcinoma of pancreas, endometrium carcinosarcoma-malignant mesodermal mixed tumour, endometrium serous carcinoma, essential thrombocythaemia, glioblastoma multiforme (GBM), Glioma, head and neck cancer, head and neck squamous cell carcinoma (HNSC), invasive lobular carcinoma (ILC) LumA breast cancer, kidney chromophobe (KICH), kidney renal clear cell carcinoma (KIRC), kidney renal papillary cell carcinoma (KIRP), acute myeloid leukemia (LAML), liver hepatocellular carcinoma (LIHC), liver cancer, lung adenocarcinoma (LUAD), lung squamous cell carcinoma (LUSC), Luminal NS carcinoma of breast, lung cancer, lymphoid cancer, medullomyoblastoma, melanoma, microsatellite instability (MSI)⁺ colorectal cancer (CRC), MSI⁺ endometrioid carcinoma, MSI⁺ stomach cancer, MSI⁺ uterine/endometrium cancer, myelodysplastic syndrome, myelofibrosis, nasopharyngeal carcinoma, neuroblastoma, non-small cell lung cancer (NSCLC), ovarian serous cystadenocarcinoma (OV), pancreatic adenocarcinoma (PAAD), prostate adenocarcinoma (PRAD), prostate cancer, renal cell carcinoma, skin cutaneous melanoma (SKCM), solitary fibrous tumors, stomach adenocarcinoma (STAD), stomach cancer, supretentorial ependyomas, thyroid adenocarcinoma (THCA), uterine corpus endometrioid carcinoma (UCEC), or uterine carcinosarcoma (UCS), uterine cancer, and uterine/endometrium adenocarcinoma.

[0075] In some embodiments, the cancer is selected from the group consisting of bladder urothelial carcinoma (BLCA), breast invasive carcinoma (BRCA), breast cancer, cervical squamous cell carcinoma and endocervical adenocarcinoma (CESC), chronic lymphocytic leukaemia (CLL), colorectal cancer (CRC), glioblastoma multiforme (GBM), head and neck squamous cell carcinoma (HNSC), kidney renal papillary cell carcinoma (KIRP), liver hepatocellular carcinoma (LIHC), lung adenocarcinoma (LUAD), lung squamous cell carcinoma (LUSC), pancreatic adenocarcinoma (PAAD), Prostate Cancer, skin cutaneous melanoma (SKCM), stomach adenocarcinoma (STAD), thyroid adenocarcinoma (THCA), and uterine corpus endometrioid carcinoma (UCEC).

[0076] In some embodiments, the subject is a human. In another embodiment, the subject has cancer. In another embodiment, the cancer is selected from the group consisting of urogenital, gynecological, lung, gastrointestinal, head and neck cancer, malignant glioblastoma, malignant mesothelioma, non-metastatic or metastatic breast cancer, malignant melanoma, Merkel Cell Carcinoma or bone and soft tissue sarcomas, haematologic neoplasias, multiple myeloma, acute myelogenous leukemia, chronic myelogenous leukemia, myelodysplastic syndrome and acute lymphoblastic leukemia, non-small cell lung cancer (NSCLC), breast cancer, metastatic colorectal cancers, hormone sensitive or hormone refractory prostate cancer, colorectal cancer, ovarian cancer, hepatocellular cancer, renal cell cancer, pancreatic cancer, gastric cancer, oesophageal cancers, hepatocellular cancers, cholangiocellular cancers, head and neck squamous cell cancer soft tissue sarcoma, and small cell lung cancer. In another embodiment, the subject has undergone surgical removal of the tumor. In another embodiment, the peptide, polynucleotide, vector, composition, or cells is administered via intravenous, intraperitoneal, intratumoral, intradermal, or subcutaneous administration. In another embodiment, the peptide, polynucleotide, vector, composition, or cells is administered into an anatomic site that drains into a lymph node basin. In another embodiment, the administration is into multiple lymph node basins. In another embodiment, the administration is by a subcutaneous or intradermal route.

[0077] In some embodiments of the method, a peptide is administered. In another embodiment, the administration is intratumorally. In another embodiment of the method, a polynucleotide, optionally RNA, is administered. In another embodiment, the polynucleotide is administered intravenously. In some embodiments of the method, a cell is administered. In another embodiment, the cell is a T cell or dendritic cell. In another embodiment, the peptide or polynucleotide comprises an antigen presenting cell targeting moiety.

[0078] In another embodiment of the method, at least one immune checkpoint inhibitor is also administered to the subject. In another embodiment, the checkpoint inhibitor is a biologic therapeutic or a small molecule. In another embodiment, the checkpoint inhibitor is selected from the group consisting of a monoclonal antibody, a humanized antibody, a fully human antibody and a fusion protein or a combination thereof. In another embodiment, the checkpoint inhibitor inhibits a checkpoint protein selected from the group consisting of CTLA-4, PDL1, PDL2, PD1, B7-H3, B7-H4, BTLA, HVEM, TIM3, GAL9, LAG3, VISTA, KIR, 2B4, CD160, CGEN-15049, CHK 1, CHK2, A2aR, and B-7 family ligands or a combination thereof. In another embodiment, the checkpoint inhibitor interacts with a ligand of a checkpoint protein selected from the group consisting of CTLA-4, PDL1, PDL2, PD1, B7-H3, B7-H4, BTLA, HVEM, TIM3, GAL9, LAG3, VISTA, KIR, 2B4, CD160, CGEN-15049, CHK 1, CHK2, A2aR, and B-7 family ligands or a combination thereof. In another embodiment, two or more checkpoint inhibitors are administered. In another embodiment, the checkpoint inhibitors are: (i) ipilimumab or tremelimumab, and (ii) nivolumab. In another embodiment, the checkpoint inhibitor and the composition are administered simultaneously or sequentially in any order. In another embodiment, a neoantigenic peptide, polynucleotide, vector, composition, or cells is administered prior to the checkpoint inhibitor. In another embodiment, a peptide, polynucleotide, vector, composition, or cells is administered after the checkpoint inhibitor. In another embodiment, the checkpoint inhibitor is continued throughout neoantigen peptide, polynucleotide, vector, composition, or cell therapy. In another embodiment, the neoantigen peptide, polynucleotide, vector, composition, or cell therapy is administered to subjects that only partially respond or do not respond to checkpoint inhibitor therapy. In another embodiment, the composition is administered intravenously or subcutaneously. In another embodiment, the checkpoint inhibitor is administered intravenously or subcutaneously. In another embodiment, the checkpoint inhibitor is administered subcutaneously within about 2 cm of the site of administration of the composition. In another embodiment, the composition is administered into the same draining lymph node as the checkpoint inhibitor.

[0079] In some embodiments of the method, an additional agent is administered. In another embodiment, the agent is a chemotherapeutic agent, an immunomodulatory drug, an immune metabolism modifying drug, a targeted therapy, radiation an anti-angiogenesis agent, or an agent that reduces immune-suppression. In another embodiment, the chemotherapeutic agent is an alkylating agent, a topoisomerase inhibitor, an anti-metabolite, or an anti-mitotic agent. In another embodiment, the additional agent is an anti-glucocorticoid induced tumor necrosis factor family receptor (GITR) agonistic antibody or antibody fragment, ibrutinib, docetaxeol, cisplatin, or cyclophosphamide. In another embodiment, the administration elicits a CD4⁺ T cell immune response. In another embodiment, the administration elicits a CD4⁺ T cell immune response and a CD8⁺ T cell immune response.

[0080] In some embodiments, the invention is directed to a method for stimulating an immune response in a subject, comprising administering an effective amount of modified cells or composition described herein. In another embodiment, the immune response is cytotoxic and/or humoral immune response. In another embodiment, the method stimulates a T cell-mediated immune response in a subject. In another embodiment, the T cell-mediated immune response is directed against a target cell. In another embodiment, the target cell is a tumor cell. In another embodiment, the modified cells are transfected or transduced in vivo. In another embodiment, the modified cells are transfected or transduced ex vivo. In another embodiment, the modified cells are autologous patient T cells. In another embodiment, the autologous patient T cells are obtained from a patient that has received a neoantigen peptide or nucleic acid vaccine. In another embodiment, the neoantigen peptide or nucleic acid vaccine comprises at least one personalized neoantigen. In another embodiment, the neoantigen peptide or nucleic acid vaccine comprises at least one additional neoantigenic peptide described herein. In another embodiment, the patient received a chemotherapeutic agent, an immunomodulatory drug, an immune metabolism modifying drug, targeted therapy or radiation prior to and/or during receipt of the neoantigen peptide or nucleic acid vaccine. In another embodiment, the patient receives treatment with at least one checkpoint inhibitor. In another embodiment, the autologous T cells are obtained from a patient that has already received at least one round of T cell therapy containing a neoantigen. In another embodiment, the method further comprises adoptive T cell therapy. In another embodiment, the adoptive T cell therapy comprises autologous T cells. In another embodiment, the autologous T cells are targeted against tumor antigens. In another embodiment, the adoptive T cell therapy further comprises allogenic T cells. In another embodiment, the allogenic T cells are targeted against tumor antigens. In another embodiment, the adoptive T cell therapy is administered before the checkpoint inhibitor.

[0081] In some embodiments, the invention is directed to a method for evaluating the efficacy of treatment comprising: (i) measuring the number or concentration of target cells in a first sample obtained from the subject before administering the modified cell, (ii) measuring the number concentration of target cells in a second sample obtained from the subject after administration of the modified cell, and (iii) determining an increase or decrease of the number or concentration of target cells in the second sample compared to the number or concentration of target cells in the first sample. In another embodiment, the treatment efficacy is determined by monitoring a clinical outcome; an increase, enhancement or prolongation of anti-tumor activity by T cells; an increase in the number of anti-tumor T cells or activated T cells as compared with the number prior to treatment; B cell activity; CD4 T cell activity; or a combination thereof. In another embodiment, the treatment efficacy is determined by monitoring a biomarker. In another embodiment, the biomarker is selected from the group consisting of CEA, Her-2/neu, bladder tumor antigen, thyroglobulin, alpha-fetoprotein, PSA, CA 125, CA19.9, CA 15.3, leptin, prolactin, osteopontin, IGF-II, CD98, fascin, sPIgR, 14-3-3 eta, troponin I, and b-type natriuretic peptide. In another embodiment, the clinical outcome is selected from the group consisting of tumor regression; tumor shrinkage; tumor necrosis; anti-tumor response by the immune system; tumor expansion, recurrence or spread; or a combination thereof. In another embodiment, the treatment effect is predicted by presence of T cells or by presence of a gene signature indicating T cell inflammation or a combination thereof.

[0082] In some embodiments, the invention is directed to a method of treating cancer or initiating, enhancing, or prolonging an anti-tumor response in a subject in need thereof comprising administering to the subject: (a) the peptide, polynucleotide, vector, composition, antibody, or cells described herein; and (b) at least one checkpoint inhibitor. In another embodiment, the method further comprises administration of an immunomodulator or adjuvant. In another embodiment, the immunomodulator or adjuvant is selected from the group consisting of Poly(I:C), Poly-ICLC, STING agonist, 1018 ISS, aluminium salts, Amplivax, AS15, BCG, CP-870,893, CpG7909, CyaA, dSLIM, GM-CSF, IC30, IC31, Imiquimod, ImuFact IMP321, IS Patch, ISS, ISCOMATRIX, Juvlmmune, LipoVac, MF59, monophosphoryl lipid A, Montanide IMS 1312 VG, Montanide ISA 206 VG, Montanide ISA 50 V2, Montanide ISA 51 VG, OK-432, OM-174, OM-197-MP-EC, ISA-TLR2 agonist, ONTAK, PepTel® vector system, PLG microparticles, resiquimod, SRL172, virosomes and other virus-like particles, YF-17D, VEGF trap, R848, beta-glucan, Pam3Cys, Pam3CSK4, acrylic or methacrylic polymers, copolymers of maleic anhydride, and QS21 stimulon. a co-stimulatory ligand, a TNF ligand, an Ig superfamily ligand, CD28, CD80, CD86, ICOS, CD40L, OX40, CD27, GITR, CD30, DR3, CD69, or 4-1BB. In another embodiment, the immunomodulator or adjuvant is Poly-ICLC. In another embodiment, the checkpoint inhibitor is an anti-PD1 antibody or antibody fragment. In another embodiment, the inhibitor of the PD-1 pathway is nivolumab. In another embodiment, the checkpoint inhibitor is an anti-CTLA4 antibody or antibody fragment. In another embodiment, the anti-CTLA4 antibody is ipilimumab or tremelimumab. In another embodiment, the method comprises administering both an anti-PD1 antibody and an anti-CTLA4 antibody. In another embodiment, the administration of the checkpoint inhibitor is initiated before initiation of administration of the peptide, polynucleotide, vector, composition, antibody, or cell. In another embodiment, the administration of the checkpoint inhibitor is initiated after initiation of administration of the peptide, polynucleotide, vector, composition, antibody, or cell. In another embodiment, the administration of the checkpoint inhibitor is initiated simultaneously with the initiation of administration of the peptide, polynucleotide, vector, composition, antibody, or cell. In another embodiment, the peptide, polynucleotide, vector, composition, antibody, or cell is administered intravenously or subcutaneously. In another embodiment, the checkpoint inhibitor is administered intravenously or subcutaneously. In another embodiment, the checkpoint inhibitor is administered subcutaneously within about 2 cm of the site of administration of the peptide, polynucleotide, vector, composition, antibody, or cell. In another embodiment, the peptide, polynucleotide, vector, composition, antibody, or cell is administered into the same draining lymph node as the checkpoint inhibitor.

[0083] In some embodiments of the therapeutic methods, the additional therapeutic agent is for example, a chemotherapeutic or biotherapeutic agent, radiation, or immunotherapy. Any suitable therapeutic treatment for a particular cancer may be administered. Examples of chemotherapeutic and biotherapeutic agents include, but are not limited to, an angiogenesis inhibitor, such ashydroxy angiostatin K 1-3, DL-a-Difluoromethy !-oroithine, endostatiii, fumagillin, genistein, minocycline, staurosporine, and thalidomide; a DNA intercaitor/cross-linker, such as Bleomycin, Carboplatin, Carrmistme, Chlorambucil, Cyclophosphamide, cis-Diammineplat nurn(D) dichloride (Cispiatin), Melphalan, Mitoxantrone, and Oxaliplatin; a DNA synthesis inhibitor, such as (+)-Amethopterin (Methotrexate), 3-Amino-1,2,4-beiizotriazine 1,4-dioxide, Aminopterin, Cytosine P-D-arabinofuraiioside, 5-Fmoro-5′-deoxyuridine, 5-Fhsorouracil, Ganciclovir, Hydroxyurea, and Mitomycin C; a DNA-RNA transcription regulator, such as Aetinomycin D, Dau orubicin, Doxorubicin, Homoharringtonine, and Idarubicin; an ori.yrip inhibitor, such as S(-i-)-Camptothecm, Curcumin, (−)-Deguelm, 5,6-Dichiorobenzimidazole 1-β-D-ribofuranoside, Etoposide, Formestane, Fostriecin, Hispidin, 2-Immo-1-imidazoli-dineacetic acid (Cyclocreatine), Mevmolin, Trichostatin A, Tyrphostin AG 34, and Tyrphostin AG 879; a gene regulator, such as 5-Aza-2′-deoxycytidine, 5-Azacytidine, Cholecalciferol (Vitamin D3), 4-Hydroxytamoxifen, Melatonin, Mifepristone, Raloxifene, all trans-Retinal (Vitamin A aldehyde), Retinoic acid all trans (Vitamin A acid), 9-cis-Retinoic Acid, 13-cis-Retinoic acid, Retinol (Vitamin A), Tamoxifen, and Troglitazone; a microtubule inhibitor, such as Colchicine, docetaxel, Dolastatirs 15, Nocodazole, Paclitaxel, Podophyl!otoxin, Rhizoxin, Vinblastine, Vi cristine, Vindesiiie, and Vinorelbine (Navelbine); and an unclassified therapeutic agent, such as 17-(Allyiamino)-17-demethoxygeldanamycin, 4-Amino-1,8-naphthalimide, Apigenin, Brefeldin A, Cimetidine, Dichioromethylene-diphosphonic acid, Leuprolide (Leuprorelin), Luteinizing Hormone-Releasing Hormone, Pifithrin-a, Rapamycin, Sex hormone-binding globulin, Thapsigargin, and Urinary trypsin inhibitor fragment (Bikunin). The therapeutic agent may be altretamine, amifostine, asparaginase, capecitabine, cladribine, cisapride, cyiarahirse, dacarbazine (DT1C), dactinomycin, dronabinol, epoetin alpha, “filgrastim, fludarabine, gemcitabine, granisetron, ifosfamide, irinotecan, lansoprazole, levamisole, leucovorin, megestrol, mesna, metoclopramide, mitotane, omeprazole, ondansetron, pilocarpine, prochloroperazine, or topotecan hydrochloride. The therapeutic agent may be a monoclonal antibody such as rituximab (Rituxan®), alemtuzumab (Campath®), Bevacizumab (Avastin®), Cetuximab (Erbitux®), panitumumab (Vectibix®), and trastuzumab (Herceptin®), Vemurafenib (Zelboraf®) imatinib mesylate (Gleevec®), erlotinib (Tarceva®), gefitinib (Iressa®), Vismodegib (Erivedge™), 90Y-ibritumomab tiuxetan, 1311-tosit.umomab, ado-trastuzumab emtansine, lapatinib (Tykerb®), pertuzumab (Perjetam), ado-trastuzumab emtansine (Adcyla™), regorafenib (Stivarga®), sunitinib (Sutent®), Denosumab (Xgeva®), sorafenib (Nexavar®), pazopanib (Votrient®), axitinib (Inita®), dasatinib (Sprycel®), nilotinib (Tasigna®), bosutinib (Bosulif®), ofatumumab (Arzerra®), obinutuzumab (Gazyva™), ibrutinib (Imbruvica™), idelalisib (Zydelig®), crizotinib (Xalkori®), erlotinib (Tarceva®), afatimb dimaleate (Giiotrif®), ceritinib (LDK378/Zykadia), Tositumomab and 1311-tositumomab (Bexxar®), ibritumomab tiuxetan (Zevalin®), brentuximab vedotin (Adcetris®), bortezomib (Velcade®), siltuximab (Sylvant™), trametinib (Ekinist®), dabrafenib (Tafmlar®), pembrolizimiab (Keytruda®), carfilzomib (Kyprolis®), Ramucirumab (Cyramza™), Cabozantinib (Cometriq™), vandetanib (Caprelsa®), Optionally, the therapeutic agent is a neoantigen. The therapeutic agent may be a cytokine such as interferons (INFs), interlcukins (ILs), or hematopoietic growth factors. The therapeutic agent may be INF-α, IL-2, Aldesleukin, IL-2, Erythropoietin, Granulocyte-macrophage colony-stimulating factor (GM-CSF) or granulocyte colony-stimulating factor. The therapeutic agent may be a targeted therapy such as toremifene (Fareston®), fulvestrant (Faslodex®), anastrozole (Arimidex®), exemestane (Aromasin®), letrozole (Femara®), ziv-aflibercept (Zaltrap®), Aiitretinoin (Panretin®), temsirolimus (Torisel®), Tretinoin (Vesanoid®), denileukin diftitox (Ontak®), vorinostat (Zoiinza®), romidepsin (Istodax®), bexarotene (Targretin®), pralatrexate (Foiotyn®), !enaliomide (Revlimid®), belinostat (Beleodaq), lenaliomide (Revlimid®), pomalidomide (Pomalyst®), Cabazitaxel (Jevtana®), enzaluiamide (Xtandi®), abiraterone acetate (Zytiga®), radium 223 chloride (Xofigo®), or everolimus (Afminiior®). Aditionally, the therapeutic agent may be an epigenetic targeted drug such as HDAC inhibitors, kinase inhibitors, DNA methyltransferase inhibitors, histone demethylase inhibitors, or histone methylation inhibitors. The epigenetic drugs may be Azacitidine (Vidaza), Decitabine (Dacogen), Vorinostat (Zoiinza), Romidepsin (Istodax), or Ruxolitinib (Jakafi). For prostate cancer treatment, a preferred chemotherapeutic agent with which anti-CTLA-4 can be combined is paclitaxel (TAXOL).

[0084] In some embodiments, the invention is directed to a kit comprising any neoantigen therapeutic described herein.

[0085] Where aspects or embodiments of the invention are described in terms of a Markush group or other grouping of alternatives, the present invention encompasses not only the entire group listed as a whole, but also each member of the group individually and all possible subgroups of the main group, and also the main group absent one or more of the group members. The present invention also envisages the explicit exclusion of one or more of any of the group members in the claimed invention.

### INCORPORATION BY REFERENCE

[0086] All publications, patents, and patent applications mentioned in this specification are herein incorporated by reference in their entirety for all purposes, to the same extent as if each individual publication, patent, or patent application was specifically and individually indicated to be incorporated by reference. For example, all publications and patents mentioned herein are incorporated herein by reference in their entirety for the purpose of describing and disclosing the kits, compositions, and methodologies that are described in the publications, which might be used in connection with the methods, kits, and compositions described herein. The documents discussed herein are provided solely for their disclosure prior to the filing date of the present application. Nothing herein is to be construed as an admission that the inventors described herein are not entitled to antedate such disclosure by virtue of prior invention or for any other reason.

### BRIEF DESCRIPTION OF THE DRAWINGS

[0087] FIG. 1 depicts and exemplary graph of 562 peptides with predicted affinity for select HLA Class I molecule between 1 nM and 100,000 nM (plotted on x-axis) that were synthesized. Actual affinity (IC₅₀ (nM)) was measured as described (y-axis). Thick vertical and horizontal lines denote 500 nM cutoff between weak and very weak predicted and observed binders, respectively. Diagonal dotted line depicts line-of-best fit (Graphpad Prism) with R² of 0.45.

[0088] FIG. 2 depicts and exemplary graph of 275 peptides from FIG. 1 that were tested for stability (T₂; hrs) on their respective HLA Class I molecules. Peptides were binned according to observed affinity from FIG. 1. Median and interquartile range is shown for each bin.

[0089] FIG. 3A depicts and exemplary graph of HLA-A02:01⁺ T cells co-cultured with monocyte-derived dendritic cells loaded with TMPRSS2::ERG fusion neoepitope (ALNSEALSV (SEQ ID NO: 140); HLA-A02:01) for 10 days. CD8⁺ T cells were analyzed for antigen-specificity for TMPRSS2::ERG fusion neoepitope using multimers (initial: BV421 and PE).

[0090] FIG. 3B depicts and exemplary graph of HLA-A02:01⁺ T cells co-cultured with monocyte-derived dendritic cells loaded with TMPRSS2::ERG fusion neoepitope (ALNSEALSV (SEQ ID NO: 140); HLA-A02:01) for 10 days. CD8⁺ T cells were analyzed for antigen-specificity for TMPRSS2::ERG fusion neoepitope using multimers (validation: APC and BUV396).

[0091] FIG. 4A depicts and exemplary graph of HLA-A02:01 T cells co-cultured with monocyte-derived dendritic cells loaded with GATA3 frameshift neoepitope (SMLTGPPARV (SEQ ID NO: 141); HLA-A02:01) for 10 days. CD8⁺ T cells were analyzed for antigen-specificity for GATA3 frameshift neoepitope using multimers (initial: APC and BUV396).

[0092] FIG. 4B depicts and exemplary graph of HLA-A02:01⁺ T cells co-cultured with monocyte-derived dendritic cells loaded with GATA3 frameshift neoepitope (SMLTGPPARV (SEQ ID NO: 141); HLA-A02:01) for 10 days. CD8⁺ T cells were analyzed for antigen-specificity for GATA3 frameshift neoepitope using multimers (validation: PE and BV421).

[0093] FIG. 5A depicts and exemplary graph of HLA-A02:01 T cells co-cultured with monocyte-derived dendritic cells loaded with β2M frameshift neoepitope (LLCVWVSSI (SEQ ID NO: 142); HLA-A02:01) for 10 days. CD8⁺ T cells were analyzed for antigen-specificity for β2M frameshift neoepitope using multimers (initial: PE and APC).

[0094] FIG. 5B depicts and exemplary graph of HLA-A02:01⁺ T cells co-cultured with monocyte-derived dendritic cells loaded with β2M frameshift neoepitope (LLCVWVSSI (SEQ ID NO: 142); HLA-A02:01) for 10 days. CD8⁺ T cells were analyzed for antigen-specificity for β2M frameshift neoepitope using multimers (validation: PE and BV421).

[0095] FIG. 6A depicts and exemplary graph of HLA-A02:01 T cells co-cultured with monocyte-derived dendritic cells loaded with KRAS G12C neoepitope (KLVVVGACGV (SEQ ID NO: 143); HLA-A02:01) for 10 days. CD8⁺ T cells were analyzed for antigen-specificity for KRAS G12C frameshift neoepitope using multimers (initial: BUV396 and BV421).

[0096] FIG. 6B depicts and exemplary graph HLA-A02:01⁺ T cells co-cultured with monocyte-derived dendritic cells loaded with KRAS G12C neoepitope (KLVVVGACGV (SEQ ID NO: 143); HLA-A02:01) for 10 days. CD8⁺ T cells were analyzed for antigen-specificity for KRAS G12C frameshift neoepitope using multimers (validation: APC and BUV396).

[0097] FIG. 7 depicts and exemplary graph of T cells co-cultured with monocyte-derived dendritic cells loaded β2M frameshift neopeptides for 20 days (restimulation with fresh monocyte-derived dendritic cells on day 20). CD4⁺ T cells were analyzed for antigen-specificity by intracellular cytokine staining after restimulation with monocyte-derived dendritic cells loaded with β2M frameshift peptide for 24 hours (right), compared to controls without peptide (left).

[0098] FIG. 8 depicts and exemplary graph of T cells co-cultured with monocyte-derived dendritic cells loaded BTK C481S neopeptide for 20 days (restimulation with fresh monocyte-derived dendritic cells on day 20). CD4⁺ T cells were analyzed for antigen-specificity by intracellular cytokine staining after restimulation with monocyte-derived dendritic cells loaded with BTK C481S neopeptide for 24 hours (right), compared to controls wild-type BTK peptide (left).

[0099] FIG. 9 depicts and exemplary graph of T cells co-cultured with monocyte-derived dendritic cells loaded GATA3 frameshift neopeptides for 20 days (restimulation with fresh monocyte-derived dendritic cells on day 20). CD4⁺ T cells were analyzed for antigen-specificity by intracellular cytokine staining after restimulation with monocyte-derived dendritic cells loaded with GATA3 frameshift peptide for 24 hours (right), compared to controls without peptide (left).

### DETAILED DESCRIPTION OF THE INVENTION

[0100] Described herein are novel immunotherapeutic agents and uses thereof based on the discovery of neoantigens arising from mutational events unique to an individual's tumor. Accordingly, the invention described herein provides peptides, polynucleotides encoding the peptides, and peptide binding agents, that can be used, for example, to stimulate an immune response to a tumor associated antigen, to create an immunogenic composition or cancer vaccine for use in treating disease.

### I. Definitions

[0101] The terminology used herein is for the purpose of describing particular cases only and is not intended to be limiting. As used herein, the singular forms “a”, “an” and “the” are intended to include the plural forms as well, unless the context clearly indicates otherwise. Furthermore, to the extent that the terms “including”, “includes”, “having”, “has”, “with”, or variants thereof are used in either the detailed description and/or the claims, such terms are intended to be inclusive in a manner similar to the term “comprising”.

[0102] The term “about” or “approximately” can mean within an acceptable error range for the particular value as determined by one of ordinary skill in the art, which will depend in part on how the value is measured or determined, i.e., the limitations of the measurement system. For example, “about” can mean within 1 or more than 1 standard deviation, per the practice in the art. Alternatively, “about” can mean a range of up to 20%, up to 10%, up to 5%, or up to 1% of a given value. Alternatively, particularly with respect to biological systems or processes, the term can mean within an order of magnitude, within 5-fold, and more preferably within 2-fold, of a value. Where particular values are described in the application and claims, unless otherwise stated the term “about” meaning within an acceptable error range for the particular value should be assumed.

[0103] To facilitate an understanding of the present invention, a number of terms and phrases are defined below.

[0104] “Neoantigen” means a class of tumor antigens which arise from tumor-specific changes in proteins. Neoantigens encompass, but are not limited to, tumor antigens which arise from, for example, substitution in the protein sequence, frame shift mutation, fusion polypeptide, in-frame deletion, insertion, expression of endogenous retroviral polypeptides, and tumor-specific overexpression of polypeptides.

[0105] “Tumor specific neoepitope” refers to an epitope that is not present in a reference such as a normal non-cancerous or germline cell but is found in cancer cells. This includes, in particular, situations wherein in a normal non-cancerous or germline cell a corresponding epitope is found, however, due to one or more mutations in a cancer cell the sequence of the epitope is changed so as to result in the neo-epitope.

[0106] A “reference” can be used to correlate and compare the results obtained in the methods of the invention from a tumor specimen. Typically the “reference” may be obtained on the basis of one or more normal specimens, in particular specimens which are not affected by a cancer disease, either obtained from a patient or one or more different individuals, for example, healthy individuals, in particular individuals of the same species. A “reference” can be determined empirically by testing a sufficiently large number of normal specimens.

[0107] The term “mutation” refers to a change of or difference in the nucleic acid sequence (nucleotide substitution, addition or deletion) compared to a reference. A “somatic mutation” can occur in any of the cells of the body except the germ cells (sperm and egg) and therefore are not passed on to children. These alterations can (but do not always) cause cancer or other diseases. In some embodiments, a mutation is a non-synonymous mutation. The term “non-synonymous mutation” refers to a mutation, for example, a nucleotide substitution, which does result in an amino acid change such as an amino acid substitution in the translation product. A “frameshift” occurs when a mutation disrupts the normal phase of a gene's codon periodicity (also known as “reading frame”), resulting in the translation of a non-native protein sequence. It is possible for different mutations in a gene to achieve the same altered reading frame.

[0108] As used herein, the term “affinity” refers to a measure of the strength of binding between two members of a binding pair, for example, an HLA-binding peptide and a class I or II HLA. K_{D} is the dissociation constant and has units of molarity. The affinity constant is the inverse of the dissociation constant. An affinity constant is sometimes used as a generic term to describe this chemical entity. It is a direct measure of the energy of binding. Affinity may be determined experimentally, for example by surface plasmon resonance (SPR) using commercially available Biacore SPR units. Affinity may also be expressed as the inhibitory concentration 50 (IC₅₀), that concentration at which 50% of the peptide is displaced. Likewise, ln(IC₅₀) refers to the natural log of the IC₅₀. K_{off} refers to the off-rate constant, for example, for dissociation of an HLA-binding peptide and a class I or II HLA.

[0109] Throughout this disclosure, “binding data” results can be expressed in terms of “IC₅₀.” IC₅₀ is the concentration of the tested peptide in a binding assay at which 50% inhibition of binding of a labeled reference peptide is observed. Given the conditions in which the assays are run (i.e., limiting HLA protein and labeled reference peptide concentrations), these values approximate K_{D} values. Assays for determining binding are well known in the art and are described in detail, for example, in PCT publications WO 94/20127 and WO 94/03205, and other publications such Sidney et al., Current Protocols in Immunology 18.3.1 (1998); Sidney, et al., J. Immunol. 154:247 (1995); and Sette, et al., Mol. Immunol. 31:813 (1994). Alternatively, binding can be expressed relative to binding by a reference standard peptide. For example, can be based on its IC₅₀, relative to the IC₅₀ of a reference standard peptide.

[0110] Binding can also be determined using other assay systems including those using: live cells (e.g., Ceppellini et al., Nature 339:392 (1989); Christnick et al., Nature 352:67 (1991); Busch et al., Int. Immunol. 2:443 (1990); Hill et al., J. Immunol. 147:189 (1991); del Guercio et al., J. Immunol. 154:685 (1995)), cell free systems using detergent lysates (e.g., Cerundolo et al., J. Immunol. 21:2069 (1991)), immobilized purified MHC (e.g., Hill et al., J. Immunol. 152, 2890 (1994); Marshall et al., J. Immunol. 152:4946 (1994)), ELISA systems (e.g., Reay et al., EMBO J. 11:2829 (1992)), surface plasmon resonance (e.g., Khilko et al., J. Biol. Chem. 268:15425 (1993)); high flux soluble phase assays (Hammer et al., J. Exp. Med. 180:2353 (1994)), and measurement of class I MHC stabilization or assembly (e.g., Ljunggren et al., Nature 346:476 (1990); Schumacher et al., Cell 62:563 (1990); Townsend et al., Cell 62:285 (1990); Parker et al., J. Immunol. 149:1896 (1992)).

[0111] “Cross-reactive binding” indicates that a peptide is bound by more than one HLA molecule; a synonym is degenerate binding.

[0112] The term “derived” when used to discuss an epitope is a synonym for “prepared.” A derived epitope can be isolated from a natural source, or it can be synthesized according to standard protocols in the art. Synthetic epitopes can comprise artificial amino acid residues “amino acid mimetics,” such as D isomers of natural occurring L amino acid residues or non-natural amino acid residues such as cyclohexylalanine. A derived or prepared epitope can be an analog of a native epitope.

[0113] A “diluent” includes sterile liquids, such as water and oils, including those of petroleum, animal, vegetable or synthetic origin, such as peanut oil, soybean oil, mineral oil, sesame oil and the like. Water is also a diluent for pharmaceutical compositions. Saline solutions and aqueous dextrose and glycerol solutions can also be employed as diluents, for example, in injectable solutions.

[0114] An “epitope” is the collective features of a molecule, such as primary, secondary and tertiary peptide structure, and charge, that together form a site recognized by, for example, an immunoglobulin, T cell receptor, HLA molecule, or chimeric antigen receptor. Alternatively, an epitope can be defined as a set of amino acid residues which is involved in recognition by a particular immunoglobulin, or in the context of T cells, those residues necessary for recognition by T cell receptor proteins, chimeric antigen receptors, and/or Major Histocompatibility Complex (MHC) receptors. Epitopes can be prepared by isolation from a natural source, or they can be synthesized according to standard protocols in the art. Synthetic epitopes can comprise artificial amino acid residues, “amino acid mimetics,” such as D isomers of naturally-occurring L amino acid residues or non-naturally-occurring amino acid residues such as cyclohexylalanine. Throughout this disclosure, epitopes may be referred to in some cases as peptides or peptide epitopes.

[0115] It is to be appreciated that proteins or peptides that comprise an epitope or an analog described herein as well as additional amino acid(s) are still within the bounds of the invention. In certain embodiments, the peptide comprises a fragment of an antigen.

[0116] In certain embodiments, there is a limitation on the length of a peptide of the invention. The embodiment that is length-limited occurs when the protein or peptide comprising an epitope described herein comprises a region (i.e., a contiguous series of amino acid residues) having 100% identity with a native sequence. In order to avoid the definition of epitope from reading, e.g., on whole natural molecules, there is a limitation on the length of any region that has 100% identity with a native peptide sequence. Thus, for a peptide comprising an epitope described herein and a region with 100% identity with a native peptide sequence, the region with 100% identity to a native sequence generally has a length of: less than or equal to 600 amino acid residues, less than or equal to 500 amino acid residues, less than or equal to 400 amino acid residues, less than or equal to 250 amino acid residues, less than or equal to 100 amino acid residues, less than or equal to 85 amino acid residues, less than or equal to 75 amino acid residues, less than or equal to 65 amino acid residues, and less than or equal to 50 amino acid residues. In certain embodiments, an “epitope” described herein is comprised by a peptide having a region with less than 51 amino acid residues that has 100% identity to a native peptide sequence, in any increment down to 5 amino acid residues; for example 50, 49, 48, 47, 46, 45, 44, 43, 42, 41, 40, 39, 38, 37, 36, 35, 34, 33, 32, 31, 30, 29, 28, 27, 26, 25, 24, 23, 22, 21, 20, 19, 18, 17, 16, 15, 14, 13, 12, 11, 10, 9, 8, 7, 6, 5, 4, 3, 2 or 1 amino acid residues.

[0117] “Human Leukocyte Antigen” or “HLA” is a human class I or class II Major Histocompatibility Complex (MHC) protein (see, e.g., Stites, et al., IMMUNOLOGY, 8TH ED., Lange Publishing, Los Altos, Calif. (1994).

[0118] An “HLA supertype or HLA family”, as used herein, describes sets of HLA molecules grouped on the basis of shared peptide-binding specificities. HLA class I molecules that share somewhat similar binding affinity for peptides bearing certain amino acid motifs are grouped into such HLA supertypes. The terms HLA superfamily, HLA supertype family, HLA family, and HLA xx-like molecules (where “xx” denotes a particular HLA type), are synonyms.

[0119] The terms “identical” or percent “identity,” in the context of two or more peptide sequences or antigen fragments, refer to two or more sequences or subsequences that are the same or have a specified percentage of amino acid residues that are the same, when compared and aligned for maximum correspondence over a comparison window, as measured using a sequence comparison algorithm or by manual alignment and visual inspection.

[0120] An “immunogenic” peptide or an “immunogenic” epitope or “peptide epitope” is a peptide that comprises an allele-specific motif such that the peptide will bind an HLA molecule and induce a cell-mediated or humoral response, for example, cytotoxic T lymphocyte (CTL), helper T lymphocyte (HTL) and/or B lymphocyte response. Thus, immunogenic peptides described herein are capable of binding to an appropriate HLA molecule and thereafter inducing a CTL (cytotoxic) response, or a HTL (and humoral) response, to the peptide.

[0121] As used herein, a “chimeric antigen receptor” or “CAR” refers to an antigen binding protein in that includes an immunoglobulin antigen binding domain (e.g., an immunoglobulin variable domain) and a T cell receptor (TCR) constant domain. As used herein, a “constant domain” of a TCR polypeptide includes a membrane-proximal TCR constant domain, and may also include a TCR transmembrane domain and/or a TCR cytoplasmic tail. For example, in some embodiments, the CAR is a dimer that includes a first polypeptide comprising a immunoglobulin heavy chain variable domain linked to a TCR.beta. constant domain and a second polypeptide comprising an immunoglobulin light chain variable domain (e.g., a κ or λ variable domain) linked to a TCRα constant domain. In some embodiments, the CAR is a dimer that includes a first polypeptide comprising a immunoglobulin heavy chain variable domain linked to a TCRα constant domain and a second polypeptide comprising an immunoglobulin light chain variable domain (e.g., a κ or λ variable domain) linked to a TCRβ constant domain.

[0122] The phrases “isolated” or “biologically pure” refer to material which is substantially or essentially free from components which normally accompany the material as it is found in its native state. Thus, isolated peptides described herein do not contain some or all of the materials normally associated with the peptides in their in situ environment. An “isolated” epitope refers to an epitope that does not include the whole sequence of the antigen from which the epitope was derived. Typically the “isolated” epitope does not have attached thereto additional amino acid residues that result in a sequence that has 100% identity over the entire length of a native sequence. The native sequence can be a sequence such as a tumor-associated antigen from which the epitope is derived. Thus, the term “isolated” means that the material is removed from its original environment (e.g., the natural environment if it is naturally occurring). For example, a naturally-occurring polynucleotide or peptide present in a living animal is not isolated, but the same polynucleotide or peptide, separated from some or all of the coexisting materials in the natural system, is isolated. Such a polynucleotide could be part of a vector, and/or such a polynucleotide or peptide could be part of a composition, and still be “isolated” in that such vector or composition is not part of its natural environment. Isolated RNA molecules include in vivo or in vitro RNA transcripts of the DNA molecules described herein, and further include such molecules produced synthetically.

[0123] “Major Histocompatibility Complex” or “MHC” is a cluster of genes that plays a role in control of the cellular interactions responsible for physiologic immune responses. In humans, the MHC complex is also known as the human leukocyte antigen (HLA) complex. For a detailed description of the MHC and HLA complexes, see, Paul, FUNDAMENTAL IMMUNOLOGY, 3.sup.RD ED., Raven Press, New York (1993).

[0124] A “native” or a “wild type” sequence refers to a sequence found in nature. Such a sequence can comprise a longer sequence in nature.

[0125] A “T cell epitope” is to be understood as meaning a peptide sequence which can be bound by the MHC molecules of class I or II in the form of a peptide-presenting MHC molecule or MHC complex and then, in this form, be recognized and bound by cytotoxic T-lymphocytes or T-helper cells, respectively.

[0126] A “receptor” is to be understood as meaning a biological molecule or a molecule grouping capable of binding a ligand. A receptor may serve, to transmit information in a cell, a cell formation or an organism. The receptor comprises at least one receptor unit, for example, where each receptor unit may consist of a protein molecule. The receptor has a structure which complements that of a ligand and may complex the ligand as a binding partner. The information is transmitted in particular by conformational changes of the receptor following complexation of the ligand on the surface of a cell. In some embodiments, a receptor is to be understood as meaning in particular proteins of MHC classes I and II capable of forming a receptor/ligand complex with a ligand, in particular a peptide or peptide fragment of suitable length.

[0127] A “ligand” is to be understood as meaning a molecule which has a structure complementary to that of a receptor and is capable of forming a complex with this receptor. In some embodiments, a ligand is to be understood as meaning a peptide or peptide fragment which has a suitable length and suitable binding motifs in its amino acid sequence, so that the peptide or peptide fragment is capable of forming a complex with proteins of MHC class I or MHC class II.

[0128] In some embodiments, a “receptor/ligand complex” is also to be understood as meaning a “receptor/peptide complex” or “receptor/peptide fragment complex”, including a peptide- or peptide fragment-presenting MHC molecule of class I or of class II.

[0129] “Proteins or molecules of the major histocompatibility complex (MHC)”, “MHC molecules”, “MHC proteins” or “HLA proteins” are to be understood as meaning proteins capable of binding peptides resulting from the proteolytic cleavage of protein antigens and representing potential lymphocyte epitopes, (e.g., T cell epitope and B cell epitope) transporting them to the cell surface and presenting them there to specific cells, in particular cytotoxic T-lymphocytes, T-helper cells, or B cells. The major histocompatibility complex in the genome comprises the genetic region whose gene products expressed on the cell surface are important for binding and presenting endogenous and/or foreign antigens and thus for regulating immunological processes. The major histocompatibility complex is classified into two gene groups coding for different proteins, namely molecules of MHC class I and molecules of MHC class II. The cellular biology and the expression patterns of the two MHC classes are adapted to these different roles.

[0130] The terms “peptide” and “peptide epitope” are used interchangeably with “oligopeptide” in the present specification to designate a series of residues connected one to the other, typically by peptide bonds between the a-amino and carboxyl groups of adjacent amino acid residues.

[0131] “Synthetic peptide” refers to a peptide that is obtained from a non-natural source, e.g., is man-made. Such peptides can be produced using such methods as chemical synthesis or recombinant DNA technology. “Synthetic peptides” include “fusion proteins.”

[0132] A “PanDR binding” peptide, a “PanDR binding epitope” is a member of a family of molecules that binds more than one HLA class II DR molecule.

[0133] “Pharmaceutically acceptable” refers to a generally non-toxic, inert, and/or physiologically compatible composition or component of a composition.

[0134] A “pharmaceutical excipient” or “excipient” comprises a material such as an adjuvant, a carrier, pH-adjusting and buffering agents, tonicity adjusting agents, wetting agents, preservatives, and the like. A “pharmaceutical excipient” is an excipient which is pharmaceutically acceptable.

[0135] The term “motif” refers to a pattern of residues in an amino acid sequence of defined length, for example, a peptide of less than about 15 amino acid residues in length, or less than about 13 amino acid residues in length, for example, from about 8 to about 13 amino acid residues (e.g., 8, 9, 10, 11, 12, or 13) for a class I HLA motif and from about 6 to about 25 amino acid residues (e.g., 6, 7, 8, 9, 10, 11, 12, 13, 14, 15, 16, 17, 18, 19, 20, 21, 22, 23, 24, or 25) for a class II HLA motif, which is recognized by a particular HLA molecule. Motifs are typically different for each HLA protein encoded by a given human HLA allele. These motifs differ in their pattern of the primary and secondary anchor residues. In some embodiments, an MHC class I motif identifies a peptide of 9, 10, or 11 amino acid residues in length.

[0136] A “supermotif” is a peptide binding specificity shared by HLA molecules encoded by two or more HLA alleles. In some embodiments, a supermotif-bearing peptide described herein is recognized with high or intermediate affinity (as defined herein) by two or more HLA antigens.

[0137] The term “naturally occurring” as used herein refers to the fact that an object can be found in nature. For example, a peptide or nucleic acid that is present in an organism (including viruses) and can be isolated from a source in nature and which has not been intentionally modified by man in the laboratory is naturally occurring.

[0138] According to the invention, the term “vaccine” relates to a pharmaceutical preparation (pharmaceutical composition) or product that upon administration induces an immune response, for example, a cellular or humoral immune response, which recognizes and attacks a pathogen or a diseased cell such as a cancer cell. A vaccine may be used for the prevention or treatment of a disease. The term “individualized cancer vaccine” or “personalized cancer vaccine” concerns a particular cancer patient and means that a cancer vaccine is adapted to the needs or special circumstances of an individual cancer patient.

[0139] A “protective immune response” or “therapeutic immune response” refers to a CTL and/or an HTL response to an antigen derived from an pathogenic antigen (e.g., a tumor antigen), which in some way prevents or at least partially arrests disease symptoms, side effects or progression. The immune response can also include an antibody response which has been facilitated by the stimulation of helper T cells.

[0140] “Antigen processing” or “processing” refers to the degradation of a polypeptide or antigen into procession products, which are fragments of said polypeptide or antigen (e.g., the degradation of a polypeptide into peptides) and the association of one or more of these fragments (e.g., via binding) with MHC molecules for presentation by cells, for example, antigen presenting cells, to specific T cells.

[0141] “Antigen presenting cells” (APC) are cells which present peptide fragments of protein antigens in association with MHC molecules on their cell surface. Some APCs may activate antigen specific T cells. Professional antigen-presenting cells are very efficient at internalizing antigen, either by phagocytosis or by receptor-mediated endocytosis, and then displaying a fragment of the antigen, bound to a class II MHC molecule, on their membrane. The T cell recognizes and interacts with the antigen-class II MHC molecule complex on the membrane of the antigen presenting cell. An additional co-stimulatory signal is then produced by the antigen presenting cell, leading to activation of the T cell. The expression of co-stimulatory molecules is a defining feature of professional antigen-presenting cells.

[0142] The main types of professional antigen-presenting cells are dendritic cells, which have the broadest range of antigen presentation, and are probably the most important antigen presenting cells, macrophages, B-cells, and certain activated epithelial cells.

[0143] Dendritic cells (DCs) are leukocyte populations that present antigens captured in peripheral tissues to T cells via both MHC class II and I antigen presentation pathways. It is well known that dendritic cells are potent inducers of immune responses and the activation of these cells is a critical step for the induction of antitumoral immunity.

[0144] Dendritic cells are conveniently categorized as “immature” and “mature” cells, which can be used as a simple way to discriminate between two well characterized phenotypes. However, this nomenclature should not be construed to exclude all possible intermediate stages of differentiation.

[0145] Immature dendritic cells are characterized as antigen presenting cells with a high capacity for antigen uptake and processing, which correlates with the high expression of Fey receptor and mannose receptor. The mature phenotype is typically characterized by a lower expression of these markers, but a high expression of cell surface molecules responsible for T cell activation such as class I and class II MHC, adhesion molecules (e. g. CD54 and CD1 1) and costimulatory molecules (e. g., CD40, CD80, CD86 and 4-1 BB).

[0146] The term “residue” refers to an amino acid residue or amino acid mimetic residue incorporated into a peptide or protein by an amide bond or amide bond mimetic, or nucleic acid (DNA or RNA) that encodes the amino acid or amino acid mimetic.

[0147] The nomenclature used to describe peptides or proteins follows the conventional practice wherein the amino group is presented to the left (the amino- or N-terminus) and the carboxyl group to the right (the carboxy- or C-terminus) of each amino acid residue. When amino acid residue positions are referred to in a peptide epitope they are numbered in an amino to carboxyl direction with position one being the residue located at the amino terminal end of the epitope, or the peptide or protein of which it can be a part.

[0148] In the formulae representing selected specific embodiments of the present invention, the amino- and carboxyl-terminal groups, although not specifically shown, are in the form they would assume at physiologic pH values, unless otherwise specified. In the amino acid structure formulae, each residue is generally represented by standard three letter or single letter designations. The L-form of an amino acid residue is represented by a capital single letter or a capital first letter of a three-letter symbol, and the D-form for those amino acid residues having D-forms is represented by a lower case single letter or a lower case three letter symbol. However, when three letter symbols or full names are used without capitals, they can refer to L amino acid residues. Glycine has no asymmetric carbon atom and is simply referred to as “Gly” or “G”. The amino acid sequences of peptides set forth herein are generally designated using the standard single letter symbol. (A, Alanine; C, Cysteine; D, Aspartic Acid; E, Glutamic Acid; F, Phenylalanine; G, Glycine; H, Histidine; I, Isoleucine; K, Lysine; L, Leucine; M, Methionine; N, Asparagine; P, Proline; Q, Glutamine; R, Arginine; S, Serine; T, Threonine; V, Valine; W, Tryptophan; and Y, Tyrosine.)

[0149] The terms “polynucleotide” and “nucleic acid” are used interchangeably herein and refer to polymers of nucleotides of any length, and include DNA and RNA, for example, mRNA. The nucleotides can be deoxyribonucleotides, ribonucleotides, modified nucleotides or bases, and/or their analogs, or any substrate that can be incorporated into a polymer by DNA or RNA polymerase. In some embodiments, the polynucleotide and nucleic acid can be in vitro transcribed mRNA. In some embodiments, the polynucleotide that is administered using the methods of the invention is mRNA.

[0150] The terms “identical” or percent “identity” in the context of two or more nucleic acids or polypeptides, refer to two or more sequences or subsequences that are the same or have a specified percentage of nucleotides or amino acid residues that are the same, when compared and aligned (introducing gaps, if necessary) for maximum correspondence, not considering any conservative amino acid substitutions as part of the sequence identity. The percent identity can be measured using sequence comparison software or algorithms or by visual inspection. Various algorithms and software that can be used to obtain alignments of amino acid or nucleotide sequences are well-known in the art. These include, but are not limited to, BLAST, ALIGN, Megalign, BestFit, GCG Wisconsin Package, and variations thereof. In some embodiments, two nucleic acids or polypeptides described herein are substantially identical, meaning they have at least 70%, at least 75%, at least 80%/0, at least 85%, at least 90%, and in some embodiments at least 95%, 96%, 97%, 98%, 99% nucleotide or amino acid residue identity, when compared and aligned for maximum correspondence, as measured using a sequence comparison algorithm or by visual inspection. In some embodiments, identity exists over a region of the sequences that is at least about 10, at least about 20, at least about 40-60 residues, at least about 60-80 residues in length or any integral value 2 between. In some embodiments, identity exists over a longer region than 60-80 residues, such as at least about 80-100 residues, and in some embodiments the sequences are substantially identical over the full length of the sequences being compared, such as the coding region of a nucleotide sequence.

[0151] A “conservative amino acid substitution” is one in which one amino acid residue is replaced with another amino acid residue having a similar side chain. Families of amino acid residues having similar side chains have been defined in the art, including basic side chains (e.g., lysine, arginine, histidine), acidic side chains (e.g., aspartic acid, glutamic acid), uncharged polar side chains (e.g., glycine, asparagine, glutamine, serine, threonine, tyrosine, cysteine), nonpolar side chains (e.g., alanine, valine, leucine, isoleucine, proline, phenylalanine, methionine, tryptophan), beta-branched side chains (e.g., threonine, valine, isoleucine) and aromatic side chains (e.g., tyrosine, phenylalanine, tryptophan, histidine). For example, substitution of a phenylalanine for a tyrosine is a conservative substitution. Methods of identifying nucleotide and amino acid conservative substitutions which do not eliminate peptide function are well-known in the art.

[0152] The term “vector” as used herein means a construct, which is capable of delivering, and usually expressing, one or more gene(s) or sequence(s) of interest in a host cell. Examples of vectors include, but are not limited to, viral vectors, naked DNA or RNA expression vectors, plasmid, cosmid, or phage vectors, DNA or RNA expression vectors associated with cationic condensing agents, and DNA or RNA expression vectors encapsulated in liposomes.

[0153] A polypeptide, antibody, polynucleotide, vector, cell, or composition which is “isolated” is a polypeptide, antibody, polynucleotide, vector, cell, or composition which is in a form not found in nature. Isolated polypeptides, antibodies, polynucleotides, vectors, cells, or compositions include those which have been purified to a degree that they are no longer in a form in which they are found in nature. In some embodiments, a polypeptide, antibody, polynucleotide, vector, cell, or composition which is isolated is substantially pure. In some embodiments, an “isolated polynucleotide” encompasses a PCR or quantitative PCR reaction comprising the polynucleotide amplified in the PCR or quantitative PCR reaction.

[0154] The term “substantially pure” as used herein refers to material which is at least 50% pure (i.e., free from contaminants), at least 90% pure, at least 95% pure, at least 98% pure, or at least 99%/0 pure.

[0155] The term “subject” refers to any animal (e.g., a mammal), including, but not limited to, humans, non-human primates, canines, felines, rodents, and the like, which is to be the recipient of a particular treatment. Typically, the terms “subject” and “patient” are used interchangeably herein in reference to a human subject.

[0156] The terms “effective amount” or “therapeutically effective amount” or “therapeutic effect” refer to an amount of a therapeutic effective to “treat” a disease or disorder in a subject or mammal. The therapeutically effective amount of a drug has a therapeutic effect and as such can prevent the development of a disease or disorder, slow down the development of a disease or disorder; slow down the progression of a disease or disorder, relieve to some extent one or more of the symptoms associated with a disease or disorder, reduce morbidity and mortality; improve quality of life; or a combination of such effects.

[0157] The terms “treating” or “treatment” or “to treat” or “alleviating” or “to alleviate” refer to both 1) therapeutic measures that cure, slow down, lessen symptoms of, and/or halt progression of a diagnosed pathologic condition or disorder and 2) prophylactic or preventative measures that prevent or slow the development of a targeted pathologic condition or disorder. Thus those in need of treatment include those already with the disorder; those prone to have the disorder; and those in whom the disorder is to be prevented.

[0158] As used in the present disclosure and claims, the singular forms “a”, “an” and “the” include plural forms unless the context clearly dictates otherwise.

[0159] It is understood that terms such as “comprises”, “comprised”, “comprising” and the like can have the meaning attributed to it in U.S. Patent law; e.g., they can mean “includes”, “included”, “including”, and the like; and that terms such as “consisting essentially of” and “consists essentially of” have the meaning ascribed to them in U.S. Patent law, e.g., they allow for elements not explicitly recited, but exclude elements that are found in the prior art or that affect a basic or novel characteristic of the invention. Nothing herein is intended as a promise.

[0160] The term “and/or” as used in a phrase such as “A and/or B” herein is intended to include both A and B; A or B; A (alone); and B (alone). Likewise, the term “and/or” as used in a phrase such as “A, B, and/or C” is intended to encompass each of the following embodiments: A, B, and C; A, B, or C; A or C; A or B; B or C; A and C; A and B; B and C; A (alone); B (alone); and C (alone).

### II. Neoantigens

[0161] One of the critical barriers to developing curative and tumor-specific immunotherapy is the identification and selection of highly specific and restricted tumor antigens to avoid autoimmunity. Tumor neoantigens, which arise as a result of genetic change (e.g., inversions, translocations, deletions, missense mutations, splice site mutations, etc.) within malignant cells, represent the most tumor-specific class of antigens. Neoantigens have rarely been used in cancer vaccine or immunogenic compositions due to technical difficulties in identifying them, selecting optimized antigens, and producing neoantigens for use in a vaccine or immunogenic composition. These problems may be addressed by: identifying mutations in neoplasias/tumors which are present at the DNA level in tumor but not in matched germline samples from a high proportion of subjects having cancer, analyzing the identified mutations with one or more peptide-MHC binding prediction algorithms to generate a plurality of neoantigen T cell epitopes that are expressed within the neoplasia/tumor and that bind to a high proportion of patient HLA alleles; and synthesizing the plurality of neoantigenic peptides selected from the sets of all neoantigen peptides and predicted binding peptides for use in a cancer vaccine or immunogenic composition suitable for treating a high proportion of subjects having cancer.

[0162] For example, translating peptide sequencing information into a therapeutic vaccine may include prediction of mutated peptides that can bind to HLA molecules of a high proportion of individuals. Efficiently choosing which particular mutations to utilize as immunogen requires the ability to predict which mutated peptides would efficiently bind to a high proportion of patient's HLA alleles. Recently, neural network based learning approaches with validated binding and non-binding peptides have advanced the accuracy of prediction algorithms for the major HLA-A and -B alleles. However, even using advanced neural network-based algorithms to encode HLA-peptide binding rules, several factors limit the power to predict peptides presented on HLA alleles.

[0163] For example, translating peptide sequencing information into a therapeutic vaccine may include formulating the drug as a multi-epitope vaccine of long peptides. Targeting as many mutated epitopes as practically possible takes advantage of the enormous capacity of the immune system, prevents the opportunity for immunological escape by down-modulation of an immune targeted gene product, and compensates for the known inaccuracy of epitope prediction approaches. Synthetic peptides provide a useful means to prepare multiple immunogens efficiently and to rapidly translate identification of mutant epitopes to an effective vaccine. Peptides can be readily synthesized chemically and easily purified utilizing reagents free of contaminating bacteria or animal substances. The small size allows a clear focus on the mutated region of the protein and also reduces irrelevant antigenic competition from other components (unmutated protein or viral vector antigens).

[0164] For example, translating peptide sequencing information into a therapeutic vaccine may include a combination with a strong vaccine adjuvant. Effective vaccines may require a strong adjuvant to initiate an immune response. For example, poly-ICLC, an agonist of TLR3 and the RNA helicase-domains of MDA5 and RIG3, has shown several desirable properties for a vaccine adjuvant. These properties include the induction of local and systemic activation of immune cells in vivo, production of stimulatory chemokines and cytokines, and stimulation of antigen-presentation by DCs. Furthermore, poly-ICLC can induce durable CD4+ and CD8+ responses in humans. Importantly, striking similarities in the upregulation of transcriptional and signal transduction pathways were seen in subjects vaccinated with poly-ICLC and in volunteers who had received the highly effective, replication-competent yellow fever vaccine. Furthermore, >90% of ovarian carcinoma patients immunized with poly-ICLC in combination with a NYESO-1 peptide vaccine (in addition to Montanide) showed induction of CD4+ and CD8+ T cell, as well as antibody responses to the peptide in a recent phase 1 study. At the same time, poly-ICLC has been extensively tested in more than 25 clinical trials to date and exhibited a relatively benign toxicity profile.

[0165] Applicants have discovered mutational events in the following genes:

[0166] ABL1, AC011997, ACVR2A, AFP, AKT1, ALK, ALPPL2, ANAPC1, APC, ARID1A, AR, AR-v7, ASCL2, β2M, BRAF, BTK, C15ORF40, CDH1, CLDN6, CNOT1, CT45A5, CTAG1B, DCT, DKK4, EEF1B2, EEF1DP3, EGFR, EIF2B3, env, EPHB2, ERBB3, ESR1, ESRP1, FAM111B, FGFR3, FRG1B, GAGE1, GAGE10, GATA3, GBP3, HER2, IDH1, JAK1, KIT, KRAS, LMAN1, MABEB16, MAGEA1, MAGEA10, MAGEA4, MAGEA8, MAGEB17, MAGEB4, MAGEC1, MEK, MLANA, MLL2, MMP13, MSH3, MSH6, MYC, NDUFC2, NRAS, PAGE2, PAGES, PDGFRa, PIK3CA, PMEL, pol protein, POLE, PTEN, RAC1, RBM27, RNF43, RPL22, RUNX1, SEC31A, SEC63, SF3B1, SLC35F5, SLC45A2, SMAP1, SMAP1, SPOP, TFAM, TGFBR2, THAP5, TP53, TTK, TYR, UBR5, VHL, XPOT an EEF1DP3:FRY fusion polypeptide, an EGFR:SEPT14 fusion polypeptide, an EGFRVIII deletion polypeptide, an EML4:ALK fusion polypeptide, an NDRG1:ERG fusion polypeptide, an AC011997.1:LRRC69 fusion polypeptide, a RUNX1(ex5)-RUNX1T1fusion polypeptide, a TMPRSS2:ERG fusion polypeptide, a NAB:STAT6 fusion polypeptide, a NDRG1:ERG fusion polypeptide, a PML:RARA fusion polypeptide, a PPP1R1B:STARD3 fusion polypeptide, a MAD1L1:MAFK fusion polypeptide, a FGFR3:TAC fusion polypeptide, a FGFR3:TACC3 fusion polypeptide, a BCR:ABL fusion polypeptide, a C11orf95:RELA fusion polypeptide, a CBFB:MYH11 fusion polypeptide, a CBFB:MYH11 fusion polypeptide, a CD74:ROS1 fusion polypeptide, a CD74:ROS1 fusion polypeptide, ERVE-4: protease, ERVE-4: reverse transcriptase, ERVE-4: reverse transcriptase, ERVE-4: unknown, ERVH-2 matrix protein, ERVH-2: gag, ERVH-2: retroviral matrix, ERVH48-1: coat protein, ERVH48-1: syncytin, ERVI-1 envelope protein, ERVK-5 gag, ERVK-5 env, ERVK-5 pol, EBV A73, EBV BALF3, EBV BALF4, EBV BALF5, EBV BARF0, EBV LF2, EBV RPMS1, HPV-16, HPV-16 E7, and HPV-16 E6.

[0167] In some embodiments, a neoantigen described herein is due to a mutational event in β2M, BTK, EGFR, GATA3, KRAS, MLL2, a TMPRSS2:ERG fusion polypeptide, or TP53.

### Neoantigen Polypeptides

[0168] In aspects, the invention provides isolated peptides that comprise a tumor specific mutation from Table 1 or 2. These peptides and polypeptides are referred to herein as “neoantigenic peptides” or “neoantigenic polypeptides”. The term “peptide” is used interchangeably with “mutant peptide” and “neoantigenic peptide” in the present specification to designate a series of residues, typically L-amino acids, connected one to the other, typically by peptide bonds between the a-amino and carboxyl groups of adjacent amino acids. Similarly, the term “polypeptide” is used interchangeably with “mutant polypeptide” and “neoantigenic polypeptide” in the present specification to designate a series of residues, e.g., L-amino acids, connected one to the other, typically by peptide bonds between the a-amino and carboxyl groups of adjacent amino acids. The polypeptides or peptides can be a variety of lengths, either in their neutral (uncharged) forms or in forms which are salts, and either free of modifications such as glycosylation, side chain oxidation, or phosphorylation or containing these modifications, subject to the condition that the modification not destroy the biological activity of the polypeptides as herein described.

[0169] In some embodiments, sequencing methods are used to identify tumor specific mutations. Any suitable sequencing method can be used according to the invention, for example, Next Generation Sequencing (NGS) technologies. Third Generation Sequencing methods might substitute for the NGS technology in the future to speed up the sequencing step of the method. For clarification purposes: the terms “Next Generation Sequencing” or “NGS” in the context of the present invention mean all novel high throughput sequencing technologies which, in contrast to the “conventional” sequencing methodology known as Sanger chemistry, read nucleic acid templates randomly in parallel along the entire genome by breaking the entire genome into small pieces. Such NGS technologies (also known as massively parallel sequencing technologies) are able to deliver nucleic acid sequence information of a whole genome, exome, transcriptome (all transcribed sequences of a genome) or methylome (all methylated sequences of a genome) in very short time periods, e.g. within 1-2 weeks, for example, within 1-7 days or within less than 24 hours and allow, in principle, single cell sequencing approaches. Multiple NGS platforms which are commercially available or which are mentioned in the literature can be used in the context of the invention e.g. those described in detail in WO 2012/159643.

[0170] In certain embodiments a neoantigenic peptide described herein molecule can comprise, but is not limited to, about 5, about 6, about 7, about 8, about 9, about 10, about 11, about 12, about 13, about 14, about 15, about 16, about 17, about 18, about 19, about 20, about 21, about 22, about 23, about 24, about 25, about 26, about 27, about 28, about 29, about 30, about 31, about 32, about 33, about 34, about 35, about 36, about 37, about 38, about 39, about 40, about 41, about 42, about 43, about 44, about 45, about 46, about 47, about 48, about 49, about 50, about 60, about 70, about 80, about 90, about 100, about 110, about 120 or greater amino acid residues, and any range derivable therein. In specific embodiments, a neoantigenic peptide molecule is equal to or less than 100 amino acids.

[0171] In some embodiments, neoantigenic peptides and polypeptides described herein for MHC Class I are 13 residues or less in length and usually consist of between about 8 and about 11 residues, particularly 9 or 10 residues. In some embodiments, neoantigenic peptides and polypeptides described herein for MHC Class II are 9-24 residues in length.

[0172] A longer neoantigenic peptide can be designed in several ways. In some embodiments, when HLA-binding peptides are predicted or known, a longer neoantigenic peptide could consist of (1) individual binding peptides with extensions of 2-5 amino acids toward the N- and C-terminus of each corresponding gene product; or (2) a concatenation of some or all of the binding peptides with extended sequences for each. In other embodiments, when sequencing reveals a long (>10 residues) neoepitope sequence present in the tumor (e.g. due to a frameshift, read-through or intron inclusion that leads to a novel peptide sequence), a longer neoantigenic peptide could consist of the entire stretch of novel tumor-specific amino acids as either a single longer peptide or several overlapping longer peptides. In some embodiments, use of a longer peptide is presumed to allow for endogenous processing by patient cells and can lead to more effective antigen presentation and induction of T cell responses. In some embodiments, two or more peptides can be used, where the peptides overlap and are tiled over the long neoantigenic peptide.

[0173] In some embodiments, the neoantigenic peptides and polypeptides bind an HLA protein (e.g., HLA class I or HLA class II). In specific embodiments the neoantigenic peptides and polypeptides bind an HLA protein with greater affinity than the corresponding wild-type peptide. In specific embodiments the neoantigenic peptide or polypeptide has an IC₅₀ of at least less than 5000 nM, at least less than 500 nM, at least less than 100 nM, at least less than 50 nM or less.

[0174] In some embodiments, the neoantigenic peptides can be from about 8 and about 50 amino acid residues in length, or from about 8 and about 30, from about 8 and about 20, from about 8 and about 18, from about 8 and about 15, or from about 8 and about 12 amino acid residues in length. In some embodiments, the neoantigenic peptides can be from about 8 and about 500 amino acid residues in length, or from about 8 and about 450, from about 8 and about 400, from about 8 and about 350, from about 8 and about 300, from about 8 and about 250, from about 8 and about 200, from about 8 and about 150, from about 8 and about 100, from about 8 and about 50, or from about 8 and about 30 amino acid residues in length.

[0175] In some embodiments, the neoantigenic peptides can be at least 8, 9, 10, 11, 12, 13, 14, 15, 16, 17, 18, 19, 20, 21, 22, 23, 24, 25, 26, 27, 28, 29, 30, 31, 32, 33, 34, 35, 36, 37, 38, 39, 40, 41, 42, 43, 44, 45, 46, 47, 48, 49, 50, or more amino acid residues in length. In some embodiments, the neoantigenic peptides can be at least 8, 9, 10, 11, 12, 13, 14, 15, 16, 17, 18, 19, 20, 21, 22, 23, 24, 25, 26, 27, 28, 29, 30, 31, 32, 33, 34, 35, 36, 37, 38, 39, 40, 41, 42, 43, 44, 45, 46, 47, 48, 49, 50, 55, 60, 70, 80, 90, 100, 150, 200, 250, 300, 350, 400, 450, 500 or more amino acid residues in length. In some embodiments, the neoantigenic peptides can be at most 8, 9, 10, 11, 12, 13, 14, 15, 16, 17, 18, 19, 20, 21, 22, 23, 24, 25, 26, 27, 28, 29, 30, 31, 32, 33, 34, 35, 36, 37, 38, 39, 40, 41, 42, 43, 44, 45, 46, 47, 48, 49, 50, or less amino acid residues in length. In some embodiments, the neoantigenic peptides can be at most 8, 9, 10, 11, 12, 13, 14, 15, 16, 17, 18, 19, 20, 21, 22, 23, 24, 25, 26, 27, 28, 29, 30, 31, 32, 33, 34, 35, 36, 37, 38, 39, 40, 41, 42, 43, 44, 45, 46, 47, 48, 49, 50, 55, 60, 70, 80, 90, 100, 150, 200, 250, 300, 350, 400, 450, 500, or less amino acid residues in length.

[0176] In some embodiments, the neoantigenic peptides has a total length of at least 8, at least 9, at least 10, at least 11, at least 12, at least 13, at least 14, at least 15, at least 16, at least 17, at least 18, at least 19, at least 20, at least 21, at least 22, at least 23, at least 24, at least 25, at least 26, at least 27, at least 28, at least 29, at least 30, at least 40, at least 50, at least 60, at least 70, at least 80, at least 90, at least 100, at least 150, at least 200, at least 250, at least 300, at least 350, at least 400, at least 450, or at least 500 amino acids.

[0177] In some embodiments, the neoantigenic peptides has a total length of at most 8, at most 9, at most 10, at most 11, at most 12, at most 13, at most 14, at most 15, at most 16, at most 17, at most 18, at most 19, at most 20, at most 21, at most 22, at most 23, at most 24, at most 25, at most 26, at most 27, at most 28, at most 29, at most 30, at most 40, at most 50, at most 60, at most 70, at most 80, at most 90, at most 100, at most 150, at most 200, at most 250, at most 300, at most 350, at most 400, at most 450, or at most 500 amino acids.

[0178] In some embodiments, the neoantigenic peptides can have a pI value of about 0.5 and about 12, about 2 and about 10, or about 4 and about 8. In some embodiments, the neoantigenic peptides can have a pI value of at least 4.5, 5, 5.5, 6, 6.5, 7, 7.5, or more. In some embodiments, the neoantigenic peptides can have a pI value of at most 4.5, 5, 5.5, 6, 6.5, 7, 7.5, or less.

[0179] In some embodiments, the neoantigenic peptides can have an HLA binding affinity of between about 1 pM and about 1 mM, about 100 pM and about 500 μM, about 500 pM and about 10 μM, about 1 nM and about 1 μM, or about 10 nM and about 1 μMIn some embodiments, the neoantigenic peptides can have an HLA binding affinity of at least 2, 3, 4, 5, 6, 7, 8, 9, 10, 15, 20, 25, 30, 35, 40, 45, 50, 55, 60, 65, 70, 75, 80, 85, 90, 95, 100, 150, 200, 250, 300, 350, 400, 450, 500, 550, 600, 700, 800, 900 M, or more. In some embodiments, the neoantigenic peptides can have an HLA binding affinity of at most 2, 3, 4, 5, 6, 7, 8, 9, 10, 15, 20, 25, 30, 35, 40, 45, 50, 55, 60, 65, 70, 75, 80, 85, 90, 95, 100, 150, 200, 250, 300, 350, 400, 450, 500, 550, 600, 700, 800, 900 μM.

[0180] In some embodiments, a neoantigenic peptide described herein can comprise carriers such as those well known in the art, e.g., thyroglobulin, albumins such as human serum albumin, tetanus toxoid, polyamino acid residues such as poly L-lysine, poly L-glutamic acid, influenza virus proteins, hepatitis B virus core protein, and the like.

[0181] In some embodiments, a neoantigenic peptide described herein can be modified by terminal-NH₂ acylation, e.g., by alkanoyl (C₁-C₂₀) or thioglycolyl acetylation, terminal-carboxyl amidation, e.g., ammonia, methylamine, etc. In some embodiments these modifications can provide sites for linking to a support or other molecule.

[0182] In some embodiments, a neoantigenic peptide described herein can contain modifications such as but not limited to glycosylation, side chain oxidation, biotinylation, phosphorylation, addition of a surface active material, e.g. a lipid, or can be chemically modified, e.g., acetylation, etc. Moreover, bonds in the peptide can be other than peptide bonds, e.g., covalent bonds, ester or ether bonds, disulfide bonds, hydrogen bonds, ionic bonds, etc.

[0183] In some embodiments, a neoantigenic peptide described herein can contain substitutions to modify a physical property (e.g., stability or solubility) of the resulting peptide. For example, neoantigenic peptides can be modified by the substitution of a cysteine (C) with a-amino butyric acid (“B”). Due to its chemical nature, cysteine has the propensity to form disulfide bridges and sufficiently alter the peptide structurally so as to reduce binding capacity. Substituting α-amino butyric acid for C not only alleviates this problem, but actually improves binding and crossbinding capability in certain instances. Substitution of cysteine with a-amino butyric acid can occur at any residue of a neoantigenic peptide, e.g., at either anchor or non-anchor positions of an epitope or analog within a peptide, or at other positions of a peptide.

[0184] In some embodiments, a neoantigenic peptide described herein can comprise amino acid mimetics or unnatural amino acid residues, e.g. D- or L-naphylalanine; D- or L-phenylglycine; D- or L-2-thieneylalanine; D- or L-1, -2, 3-, or 4-pyreneylalanine; D- or L-3 thieneylalanine; D- or L-(2-pyridinyl)-alanine; D- or L-(3-pyridinyl)-alanine; D- or L-(2-pyrazinyl)-alanine; D- or L-(4-isopropyl)-phenylglycine; D-(trifluoromethyl)-phenylglycine; D-(trifluoro-methyl)-phenylalanine; D-.rho.-fluorophenylalanine; D- or L-.rho.-biphenyl-phenylalanine; D- or L-.rho.-methoxybiphenylphenylalanine; D- or L-2-indole(allyl)alanines; and, D- or L-alkylalanines, where the alkyl group can be a substituted or unsubstituted methyl, ethyl, propyl, hexyl, butyl, pentyl, isopropyl, iso-butyl, sec-isotyl, iso-pentyl, or a non-acidic amino acid residues. Aromatic rings of a non-natural amino acid include, e.g., thiazolyl, thiophenyl, pyrazolyl, benzimidazolyl, naphthyl, furanyl, pyrrolyl, and pyridyl aromatic rings. Modified peptides that have various amino acid mimetics or unnatural amino acid residues are particularly useful, as they tend to manifest increased stability in vivo. Such peptides can also possess improved shelf-life or manufacturing properties.

[0185] Peptide stability can be assayed in a number of ways. For instance, peptidases and various biological media, such as human plasma and serum, have been used to test stability. See, e.g., Verhoef, et al., Eur. J. Drug Metab. Pharmacokinetics 11:291 (1986). Half-life of the peptides described herein is conveniently determined using a 25% human serum (v/v) assay. The protocol is as follows: pooled human serum (Type AB, non-heat inactivated) is dilapidated by centrifugation before use. The serum is then diluted to 25% with RPMI-1640 or another suitable tissue culture medium. At predetermined time intervals, a small amount of reaction solution is removed and added to either 6% aqueous trichloroacetic acid (TCA) or ethanol. The cloudy reaction sample is cooled (4° C.) for 15 minutes and then spun to pellet the precipitated serum proteins. The presence of the peptides is then determined by reversed-phase HPLC using stability-specific chromatography conditions.

[0186] In some embodiments, a neoantigenic peptide described herein can be in solution, lyophylized, or can be in crystal form.

[0187] In some embodiments, a neoantigenic peptide described herein can be prepared synthetically, by recombinant DNA technology or chemical synthesis, or can be isolated from natural sources such as native tumors or pathogenic organisms. Epitopes can be synthesized individually or joined directly or indirectly in a peptide. Although a neoantigenic peptide described herein will be substantially free of other naturally occurring host cell proteins and fragments thereof, in some embodiments the peptide can be synthetically conjugated to be joined to native fragments or particles.

[0188] In some embodiments, a neoantigenic peptide described herein can be prepared in a wide variety of ways. In some embodiments, the peptides can be synthesized in solution or on a solid support according to conventional techniques. Various automatic synthesizers are commercially available and can be used according to known protocols. (See, for example, Stewart & Young, SOLID PHASE PEPTIDE SYNTHESIS, 2D. ED., Pierce Chemical Co., 1984). Further, individual peptides can be joined using chemical ligation to produce larger peptides that are still within the bounds of the invention.

[0189] Alternatively, recombinant DNA technology can be employed wherein a nucleotide sequence which encodes a peptide inserted into an expression vector, transformed or transfected into an appropriate host cell and cultivated under conditions suitable for expression. These procedures are generally known in the art, as described generally in Sambrook et al., MOLECULAR CLONING, A LABORATORY MANUAL, Cold Spring Harbor Press, Cold Spring Harbor, N.Y. (1989). Thus, recombinant peptides, which comprise or consist of one or more epitopes described herein, can be used to present the appropriate T cell epitope.

[0190] In one aspect, the invention described herein also provides compositions comprising one, at least two, or more than two neoantigenic peptides. In some embodiments a composition described herein contains at least two distinct peptides. In some embodiments, the at least two distinct peptides are derived from the same polypeptide. By distinct polypeptides is meant that the peptide vary by length, amino acid sequence or both. The peptides are derived from any polypeptide known to or have been found to contain a tumor specific mutation.

[0191] In some embodiments, the isolated neoantigenic peptide is encoded by a gene with a point mutation resulting in an amino acid substitution of the native peptide.

[0192] In some embodiments, the isolated neoantigenic peptide is encoded by a ABL gene. In related embodiments, AₓB_{y}C_{z} is

(SEQ ID NO: 1)

VADGLITTLHYPAPKRNKPTVYGVSPNYDKWEMERTDITMKHKLGGGQYG
KVYEGVWKKYSLTVAVKTLKEDTMEVEEFLKEAAVMKEIKHPNLVQLL
GVC,

(SEQ ID NO: 2)

VADGLITTLHYPAPKRNKPTVYGVSPNYDKWEMERTDITMKHKLGGGQYG
VVYEGVWKKYSLTVAVKTLKEDTMEVEEFLKEAAVMKEIKHPNLVQLL
GVC,

(SEQ ID NO: 3)

LLGVCTREPPFYIITEFMTYGNLLDYLRECNRQEVNAVVLLYMATQISS
ATEYLEKKNFIHRDLAARNCLVGENHLVKVADFGLSRLMTGDTYTAHAG
AKF,

(SEQ ID NO: 4)

SLTVAVKTLKEDTMEVEEFLKEAAVMKEIKHPNLVQLLGVCTREPPFYI
IIEFMTYGNLLDYLRECNRQEVNAVVLLYMATQISSAMEYLEKKNFIH
RDLA,
or

(SEQ ID NO: 5)

STVADGLITTLHYPAPKRNKPTVYGVSPNYDKWEMERTDITMKHKLGGG
QHGEVYEGVWKKYSLTVAVKTLKEDTMEVEEFLKEAAVMKEIKHPNL
VQLLG.

[0193] In some embodiments, the isolated neoantigenic peptide is encoded by a ALK gene. In related embodiments, AₓB_{y}C_{z} is

(SEQ ID NO: 6)

SSLAMLDLLHVARDIACGCQYLEENHFIHRDIAARNCLLTCPGPGRVAKI
ADFGMARDIYRASYYRKGGCAMLPVKWMPPEAFMEGIFTSKTDTWSF
GVLL
or

(SEQ ID NO: 7)

QVAVKTLPEVCSEQDELDFLMEALIISKFNHQNIVRCIGVSLQSLPRFIL
MELMAGGDLKSFLRETRPRPSQPSSLAMLDLLHVARDIACGCQYLEENH
FI.

[0194] In some embodiments, the isolated neoantigenic peptide is encoded by a BRAF gene. In related embodiments, AₓB_{y}C_{z} is MIKLIDIARQTAQGMDYLHAKSIIHRDLKSNNIFLHEDLTVKIGDFGLATEKSRWSGSHQFEQLSGSIL WMAPEVIRMQDKNPYSFQSDVYAFGIVLYELM (SEQ ID NO: 8). In some related embodiments, the neoantigenic peptide is not DFGLATEKSR (SEQ ID NO: 144) or FGLATEKSRW (SEQ ID NO: 145).

[0195] In some embodiments, the isolated neoantigenic peptide is encoded by a BTK gene. In related embodiments, AₓB_{y}C_{z} is

(SEQ ID NO: 9)

MIKEGSMSEDEFIEEAKVMMNLSHEKLVQLYGVCTKQRPIFIITEYMANG
SLLNYLREMRHRFQTQQLLEMCKDVCEAMEYLESKQFLHRDLAARNC
LVND.

[0196] In some embodiments, the isolated neoantigenic peptide is encoded by a EEF1B2 gene. In related embodiments, AₓB_{y}C_{z} is MGFGDLKSPAGLQVLNDYLADKSYIEGYVPSQADVAVFEAVSGPPPADLCHALRWYNHIKSYEKEK ASLPGVKKALGKYGPADVEDTTGSGAT (SEQ ID NO: 10). In some related embodiments, the neoantigenic peptide is not EAVSGPPPA (SEQ ID NO: 146), FEAVSGPPP (SEQ ID NO: 147) or FEAVSGPPPA (SEQ ID NO: 148).

[0197] In some embodiments, the isolated neoantigenic peptide is encoded by a EGFR gene. In related embodiments, AₓB_{y}C_{z} is

(SEQ ID NO: 149)

MSLNITSLGLRSLKEISDGDVIISGNKNLCYANTINWKKLFGTSGQKTKI
IRNRGENSCKATGQVCHALCSPEGCWGPEPRDCVSCRNVSRGRECVD
KCNLL
or

(SEQ ID NO: 12)

IPVAIKELREATSPKANKEILDEAYVMASVDNPHVCRLLGICLTSTVQLI
MQLMPFGCLLDYVREHKDNIGSQYLLNWCVQIAKGMNYLEDRRLVHR
DLAA.

[0198] In some embodiments, the isolated neoantigenic peptide is encoded by a ERBB3 gene. In related embodiments, AₓB_{y}C_{z} is EFSTLPLPNLRMVRGTQVYDGKF (SEQ ID NO: 150). In some related embodiments, the neoantigenic peptide is not RMVRGTQVY (SEQ ID NO: 151), LPLPNLRMV (SEQ ID NO: 152), LRMVRGTQV (SEQ ID NO: 153), TLPLPNLRMV (SEQ ID NO: 154), NLRMVRGTQV (SEQ ID NO: 155), or LRMVRGTQVY (SEQ ID NO: 156).

[0199] In some embodiments, the isolated neoantigenic peptide is encoded by a ESR1 gene. In related embodiments, AₓB_{y}C_{z} is

(SEQ ID NO: 14)

HLMAKAGLTLQQQHQRLAQLLLILSHIRHMSNKGMEHLYSMKCKNVVPLY
GLLLEMLDAHRLHAPTSRGGASVEETDQSHLATAGSTSSHSLQKYYITGE
A,

(SEQ ID NO: 15)

NQGKCVEGMVEIFDMLLATSSRFRMMNLQGEEFVCLKSIILLNSGVYTFL
PSTLKSLEEKDHIHRVLDKITDTLIHLMAKAGLTLQQQHQRLAQLLLILS
H,

(SEQ ID NO: 16)

IHLMAKAGLTLQQQHQRLAQLLLILSHIRHMSNKGMEHLYSMKCKNVVPL
CDLLLEMLDAHRLHAPTSRGGASVEETDQSHLATAGSTSSHSLQKYYITG
E,

(SEQ ID NO: 17)

IHLMAKAGLTLQQQHQRLAQLLLILSHIRHMSNKGMEHLYSMKCKNVVPL
NDLLLEMLDAHRLHAPTSRGGASVEETDQSHLATAGSTSSHSLQKYYITG
E,
or

(SEQ ID NO: 18)

IHLMAKAGLTLQQQHQRLAQLLLILSHIRHMSNKGMEHLYSMKCKNVVPL
SDLLLEMLDAHRLHAPTSRGGASVEETDQSHLATAGSTSSHSLQKYYITG
E.

[0200] In some embodiments, the isolated neoantigenic peptide is encoded by a FGFR3 gene. In related embodiments, AₓB_{y}C_{z} is HRIGGIKLRHQQWSLVMESVVPSDRGNYTCVVENKFGSIRQTYTLDVLERCPHRPILQAGLPANQTA VLGSDVEFHCKVYSDAQPHIQWLKHVEVNGSKVG (SEQ ID NO: 19). In some related embodiments, the neoantigenic peptide is not DVLERCPHR (SEQ ID NO: 157), LERCPHRPI (SEQ ID NO: 158), CPHRPILQA (SEQ ID NO: 159), or LERCPHRPIL (SEQ ID NO: 160).

[0201] In some embodiments, the isolated neoantigenic peptide is encoded by a FRG1B gene. In related embodiments, AₓB_{y}C_{z} is AVKLSDSRIALKSGYGKYLGINSDELVGHSDAIGPREQWEPVFQNGKMALSASNSCFIRCNEAGDIEA KSKTAGEEEMIKIRSCAEKETKKKDDIPEEDKG (SEQ ID NO: 20). In some related embodiments, the neoantigenic peptide is not SASNSCFIR (SEQ ID NO: 161), LSASNSCFI (SEQ ID NO: 162), ALSASNSCF (SEQ ID NO: 163) or FQNGKMALSA (SEQ ID NO: 164).

[0202] In some embodiments, the isolated neoantigenic peptide is encoded by a HER2 gene. In related embodiments, AₓB_{y}C_{z} is

(SEQ ID NO: 21)

GSGAFGTVYKGIWIPDGENVKIPVAIKVLRENTSPKANKEILDEAYVMAG
LGSPYVSRLLGICLTSTVQLVTQLMPYGCLLDHVRENRGRLGSQDLLNWC
M.

[0203] In some embodiments, the isolated neoantigenic peptide is encoded by a IDH1 gene. In related embodiments, AₓB_{y}C_{z} is RVEEFKLKQMWKSPNGTIRNILGGTVFREAIICKNIPRLVSGWVKPIIIGHHAYGDQYRATDFVVPGP GKVEITYTPSDGTQKVTYLVHNFEEGGGVAMGM (SEQ ID NO: 22), RVEEFKLKQMWKSPNGTIRNILGGTVFREAIICKNIPRLVSGWVKPIIIGCHAYGDQYRATDFVVPGPG KVEITYTPSDGTQKVTYLVHNFEEGGGVAMGM (SEQ ID NO: 23), RVEEFKLKQMWKSPNGTIRNILGGTVFREAIICKNIPRLVSGWVKPIIIGGHAYGDQYRATDFVVPGP GKVEITYTPSDGTQKVTYLVHNFEEGGGVAMGM (SEQ ID NO: 24), or RVEEFKLKQMWKSPNGTIRNILGGTVFREAIICKNIPRLVSGWVKPIIIGSHAYGDQYRATDFVVPGPG KVEITYTPSDGTQKVTYLVHNFEEGGGVAMGM (SEQ ID NO: 25). In some related embodiments, the neoantigenic peptide is not PIIIGHHAY (SEQ ID NO: 165), GHHAYGDQY (SEQ ID NO: 166), KPIIIGHHAY (SEQ ID NO: 167), IGHHAYGDQY (SEQ ID NO: 168), PIIIGCHAY (SEQ ID NO: 169), GCHAYGDQY (SEQ ID NO: 170), KPIIIGCHAY (SEQ ID NO: 171), IGCHAYGDQY (SEQ ID NO: 172), PIIIGGHAY (SEQ ID NO: 173), GGHAYGDQY (SEQ ID NO: 174), KPIIIGGHAY (SEQ ID NO: 175), or IGGHAYGDQY (SEQ ID NO: 176).

[0204] In some embodiments, the isolated neoantigenic peptide is encoded by a KIT gene. In related embodiments, AₓB_{y}C_{z} is

(SEQ ID NO: 26)

VEATAYGLIKSDAAMTVAVKMLKPSAHLTEREALMSELKVLSYLGNHMNI
ANLLGACTIGGPTLVITEYCCYGDLLNFLRRKRDSFICSKQEDHAEAALY
K
or

(SEQ ID NO: 26)

VEATAYGLIKSDAAMTVAVKMLKPSAHLTEREALMSELKVLSYLGNHMNI
ANLLGACTIGGPTLVITEYCCYGDLLNFLRRKRDSFICSKQEDHAEAALY
K.

[0205] In some embodiments, the isolated neoantigenic peptide is MEK gene. In related embodiments, AₓB_{y}C_{z} is

(SEQ ID NO: 27)

ISELGAGNGGVVFKVSHKPSGLVMARKLIHLEIKPAIRNQIIRELQVLHE
SNSPYIVGFYGAFYSDGEISICMEHMDGGSLDQVLKKAGRIPEQILGKVS
I
or

(SEQ ID NO: 28)

LGAGNGGVVFKVSHKPSGLVMARKLIHLEIKPAIRNQIIRELQVLHECNS
LYIVGFYGAFYSDGEISICMEHMDGGSLDQVLKKAGRIPEQILGKVSIAV
I.

[0206] In some embodiments, the isolated neoantigenic peptide is encoded by a MYC gene. In related embodiments, AₓB_{y}C_{z} is

(SEQ ID NO: 29)

MPLNVSFTNRNYDLDYDSVQPYFYCDEEENFYQQQQQSDLQPPAPSEDIW
KKFELLPTPPLSPSRRSGLCSPSYVAVTPFSLRGDNDGG,

(SEQ ID NO: 30)

FTNRNYDLDYDSVQPYFYCDEEENFYQQQQQSELQPPAPSEDIWKKFELL
STPPLSPSRRSGLCSPSYVAVTPFSLRGDNDGGGGSFSTADQLEMVTELL
G,
or

(SEQ ID NO: 31)

TNRNYDLDYDSVQPYFYCDEEENFYQQQQQSELQPPAPSEDIWKKFELLP
IPPLSPSRRSGLCSPSYVAVTPFSLRGDNDGGGGSFSTADQLEMVTELLG
G.

[0207] In some embodiments, the isolated neoantigenic peptide is encoded by a PDGFRa gene. In related embodiments, AₓB_{y}C_{z} is

(SEQ ID NO: 32)

VAVKMLKPTARSSEKQALMSELKIMTHLGPHLNIVNLLGACTKSGPIYII
IEYCFYGDLVNYLHKNRDSFLSHHPEKPKKELDIFGLNPADESTRSYVIL
S.

[0208] In some embodiments, the isolated neoantigenic peptide is encoded by a PIK3CA gene. In related embodiments, AₓB_{y}C_{z} is IEEHANWSVSREAGFSYSHAGLSNRLARDNELRENDKEQLKAISTRDPLSKITEQEKDFLWSHRHYC VTIPEILPKLLLSVKWNSRDEVAQMYCLVKDWPP (SEQ ID NO: 33), HANWSVSREAGFSYSHAGLSNRLARDNELRENDKEQLKAISTRDPLSEITKQEKDFLWSHRHYCVTI PEILPKLLLSVKWNSRDEVAQMYCLVKDWPPIKP (SEQ ID NO: 34), or LFINLFSMMLGSGMPELQSFDDIAYIRKTLALDKTEQEALEYFMKQMNDARHGGWTTKMDWIFHTI KQHALN (SEQ ID NO: 35). In some related embodiments, the neoantigenic peptide is not ISTRDPLSK (SEQ ID NO: 177), STRDPLSKI (SEQ ID NO: 178), LSKITEQEK (SEQ ID NO: 179), AISTRDPLSK (SEQ ID NO: 180), SKITEQEKDF (SEQ ID NO: 181), SEITKQEKDF (SEQ ID NO: 182), KQEKDFLWSH (SEQ ID NO: 183), FMKQMNDAR (SEQ ID NO: 184), KQMNDARHG (SEQ ID NO: 185), RHGGWTTKM (SEQ ID NO: 186), YFMKQMNDAR (SEQ ID NO: 187), FMKQMNDARH (SEQ ID NO: 188), KQMNDARHGG (SEQ ID NO: 189), QMNDARHGGW (SEQ ID NO: 190), or ARHGGWTTKM (SEQ ID NO: 191).

[0209] In some embodiments, the isolated neoantigenic peptide is encoded by a POLE gene. In related embodiments, AₓB_{y}C_{z} is QRGGVITDEEETSKKIADQLDNIVDMREYDVPYHIRLSIDIETTKLPLKFRDAETDQIMMISYMIDGQG YLITNREIVSEDIEDFEFTPKPEYEGPFCVFN (SEQ ID NO: 36). In some related embodiments, the neoantigenic peptide is not TTKLPLKFR (SEQ ID NO: 192), RDAETDQIM (SEQ ID NO: 193), KFRDAETDQI (SEQ ID NO: 194), ETTKLPLKFR (SEQ ID NO: 195), or RDAETDQIMM (SEQ ID NO: 196).

[0210] In some embodiments, the isolated neoantigenic peptide is encoded by a PTEN gene. In related embodiments, AₓB_{y}C_{z} is KFNCRVAQYPFEDHNPPQLELIKPFCEDLDQWLSEDDNHVAAIHCKAGKGQTGVMICAYLLHRGKF LKAQEALDFYGEVRTRDKKGVTIPSQRRYVYYYSY (SEQ ID NO: 37). In some related embodiments, the neoantigenic peptide is not QTGVMICAY (SEQ ID NO: 197), GKGQTGVMI (SEQ ID NO: 198), GQTGVMICAY (SEQ ID NO: 199), or KAGKGQTGVM (SEQ ID NO: 200).

[0211] In some embodiments, the isolated neoantigenic peptide is encoded by a RAC1 gene. In related embodiments, AₓB_{y}C_{z} is MQAIKCVVVGDGAVGKTCLLISYTTNAFSGEYIPTVFDNYSANVMVDGKPVNLGLWDTAGQEDYD RLRPLSYPQTVGET (SEQ ID NO: 38). In some related embodiments, the neoantigenic peptide is not TTNAFSGEY (SEQ ID NO: 201), FSGEYIPTV (SEQ ID NO: 202), SGEYIPTVF (SEQ ID NO: 203), YTTNAFSGEY (SEQ ID NO: 204), TTNAFSGEYI (SEQ ID NO: 205), or FSGEYIPTVF (SEQ ID NO: 206).

[0212] In some embodiments, the isolated neoantigenic peptide is encoded by a TP53 gene. In related embodiments, AₓB_{y}C_{z} is IRVEGNLRVEYLDDRNTFRHSVVVPYEPPEVGSDCTTIHYNYMCNSSCMGSMNRRPILTIITLEDSSG NLLGRNSFEVRVCACPGRDRRTEEENLRKKGEP (SEQ ID NO: 39), TYSPALNKMFCQLAKTCPVQLWVDSTPPPGTRVRAMAIYKQSQHMTEVVRHCPHHERCSDSDGLAP PQHLIRVEGNLRVEYLDDRNTFRHSVVVPYEPPEV (SEQ ID NO: 40), EGNLRVEYLDDRNTFRHSVVVPYEPPEVGSDCTTIHYNYMCNSSCMGGMNQRPILTIITLEDSSGNLL GRNSFEVRVCACPGRDRRTEEENLRKKGEPHHE (SEQ ID NO: 41), EGNLRVEYLDDRNTFRHSVVVPYEPPEVGSDCTTIHYNYMCNSSCMGGMNWRPILTIITLEDSSGNLL GRNSFEVRVCACPGRDRRTEEENLRKKGEPHHE (SEQ ID NO: 42), or PEVGSDCTTIHYNYMCNSSCMGGMNRRPILTIITLEDSSGNLLGRNSFEVCVCACPGRDRRTEEENLR KKGEPHHELPPGSTKRALPNNTSSSPQPKKKPL (SEQ ID NO: 43). In some related embodiments, the neoantigenic peptide is not SSCMGSMNR (SEQ ID NO: 207), GSMNRRPIL (SEQ ID NO: 208), MGSMNRRPI (SEQ ID NO: 209), CNSSCMGSM (SEQ ID NO: 210), SMNRRPILTI (SEQ ID NO: 211), SSCMGSMNRR (SEQ ID NO: 212), NSSCMGSMNR (SEQ ID NO: 213), MGSMNRRPIL (SEQ ID NO: 214), MCNSSCMGSM (SEQ ID NO: 215), CMGSMNRRPI (SEQ ID NO: 216), TEVVRHCPH (SEQ ID NO: 217), VVRHCPHHER (SEQ ID NO: 218), SQHMTEVVRH (SEQ ID NO: 219), MNQRPILTI (SEQ ID NO: 220), NQRPILTII (SEQ ID NO: 221), CMGGMNQRPI (SEQ ID NO: 222), GMNQRPILTI (SEQ ID NO: 223), SSCMGGMNQR (SEQ ID NO: 224), NQRPILTIIT (SEQ ID NO: 225), NWRPILTII (SEQ ID NO: 226), SSCMGGMNW (SEQ ID NO: 227), MGGMNWRPI (SEQ ID NO: 228), MNWRPILTI (SEQ ID NO: 229), CMGGMNWRPI (SEQ ID NO: 230), GMNWRPILTI (SEQ ID NO: 231), SSCMGGMNWR (SEQ ID NO: 232), MNWRPILTII (SEQ ID NO: 233), NSSCMGGMNW (SEQ ID NO: 234), NSFEVCVCA (SEQ ID NO: 235), EVCVCACPGR (SEQ ID NO: 236), or FEVCVCACPG (SEQ ID NO: 237).

[0213] In some embodiments, the isolated neoantigenic peptide is encoded by a gene with a frameshift mutation

[0214] In some embodiments, the isolated neoantigenic peptide is encoded by a ACVR2A gene. In related embodiments, AₓB_{y}C_{z} is

(SEQ ID NO: 83)

GVEPCYGDKDKRRHCFATWKNISGSIEIVKQGCWLDDINCYDRTDCVEKK
RQPorGVEPCYGDKDKRRHCFATWKNISGSIEIVKQGCWLDDINCYDRTD
CVEKKTALKYIFVAVRAICVM

(SEQ ID NO: 84)

KSFLIFRRWKSHSPLQIQLHLSHPITTSCSIPWCHLC.

[0215] In some embodiments, the isolated neoantigenic peptide is C15ORF40 gene. In related embodiments, AₓB_{y}C_{z} is

(SEQ ID NO: 85)

TAEAVNVAIAAPPSEGEANAELCRYLSKVLELRKSDVVLDKVGLALFFFF
FETKSCSVAQAGVQWRSLGSLQPPPPGFKLFSCLSFLSSWDYRRMPPCLA
NFCIFNRDGVSPCWSGWS.

[0216] In some embodiments, the isolated neoantigenic peptide is encoded by a CNOT1 gene. In related embodiments, AₓB_{y}C_{z} is

(SEQ ID NO: 86)

LSVIIFFFVYIWHWALPLILNNHHICLMSSIILDCNSVRQSIMSVCFFFF
SVIFSTRCLTDSRYPNICWFK
or

(SEQ ID NO: 87)

LSVIIFFFVYIWHWALPLILNNHHICLMSSIILDCNSVRQSIMSVCFFFF
CYILNTMFDR.

[0217] In some embodiments, the isolated neoantigenic peptide is encoded by a EIF2B3 gene. In related embodiments, AₓB_{y}C_{z} is

(SEQ ID NO: 88)

VLVLSCDLITDVALHEVVDLFRAYDASLAMLMRKGQDSIEPVPGQKGKKK
QWSSVTSLEWTAQERGCSSWLMKQTWMKSWSLRDPSYRSILEYVSTRVLW
MPTSTV.

[0218] In some embodiments, the isolated neoantigenic peptide is encoded by a EPHB2 gene. In related embodiments, AₓB_{y}C_{z} is

(SEQ ID NO: 89)

SIQVMRAQMNQIQSVEGQPLARRPRATGRTKRCQPRDVTKKTCNSNDGKK
REWEKRKQILGGGGKYKEYFLKRILIRKAMTVLAGDKKGLGRFMRCVQSE
TKAVSLQLPLGR.

[0219] In some embodiments, the isolated neoantigenic peptide is encoded by a ESRP1 gene. In related embodiments, AₓB_{y}C_{z} is

(SEQ ID NO: 90)

LDFLGEFATDIRTHGVHMVLNHQGRPSGDAFIQMKSADRAFMAAQKCHKK
KHEGQIC
or

(SEQ ID NO: 91)

LDFLGEFATDIRTHGVHMVLNHQGRPSGDAFIQMKSADRAFMAAQKCHKK
T.

[0220] In some embodiments, the isolated neoantigenic peptide is encoded by a FAM11B gene. In related embodiments, AₓB_{y}C_{z} is GALCKDGRFRSDIGEFEWKLKEGHKKIYGKQSMVDEVSGKVLEMDISKKKHYNRKISIKKLNRMKV PLMKLITRV (SEQ ID NO: 92). In some related embodiments, the neoantigenic peptide is not KLNRMKVPL (SEQ ID NO: 238), PLMKLITRV (SEQ ID NO: 239), RMKVPLMKL (SEQ ID NO: 240), ISKKKHYNR (SEQ ID NO: 241), SKKKHYNRK (SEQ ID NO: 242), KHYNRKISI (SEQ ID NO: 243), HYNRKISIK (SEQ ID NO: 244), YNRKISIKK (SEQ ID NO: 245), KISIKKLNR (SEQ ID NO: 246), SIKKLNRMK (SEQ ID NO: 247), LNRMKVPLM (SEQ ID NO: 248), ISIKKLNRM (SEQ ID NO: 249), MKVPLMKLI (SEQ ID NO: 250), KLNRMKVPLM (SEQ ID NO: 251), RMKVPLMKLI (SEQ ID NO: 252), ISIKKLNRMK (SEQ ID NO: 253), ISKKKHYNRK (SEQ ID NO: 254), KHYNRKISIK (SEQ ID NO: 255), HYNRKISIKK (SEQ ID NO: 256), KISIKKLNRM (SEQ ID NO: 257), SIKKLNRMKV (SEQ ID NO: 258), LNRMKVPLMK (SEQ ID NO: 259), KVPLMKLITR (SEQ ID NO: 260), DISKKKHYNR (SEQ ID NO: 261), KKHYNRKISI (SEQ ID NO: 262), KKLNRMKVPL (SEQ ID NO: 263), or VPLMKLITRV (SEQ ID NO: 264).

[0221] In some embodiments, the isolated neoantigenic peptide is encoded by a GBP3 gene. In related embodiments, AₓB_{y}C_{z} is

(SEQ ID NO: 93)

RERAQLLEEQEKTLTSKLQEQARVLKERCQGESTQLQNEIQKLQKTLKKK
PRDICRIS.

[0222] In some embodiments, the isolated neoantigenic peptide is encoded by a JAK1 gene. In related embodiments, AₓB_{y}C_{z} is

(SEQ ID NO: 94)

VNTLKEGKRLPCPPNCPDEVYQLMRKCWEFQPSNRTSFQNLIEGFEALLK
TSN
or

(SEQ ID NO: 95)

CRPVTPSCKELADLMTRCMNYDPNQRPFFRAIMRDINKLEEQNPDIVSEK
NQQLKWTPHILKSAS.

[0223] In some embodiments, the isolated neoantigenic peptide is encoded by a LMAN1 gene. In related embodiments, AₓB_{y}C_{z} is

(SEQ ID NO: 96)

DDHDVLSFLTFQLTEPGKEPPTPDKEISEKEKEKYQEEFEHFQQELDKKK
RGIPEGPPRPPRAACGGNI
or

(SEQ ID NO: 97)

DDHDVLSFLTFQLTEPGKEPPTPDKEISEKEKEKYQEEFEHFQQELDKKK
RNSRRATPTSKGSLRRKYLRV.

[0224] In some embodiments, the isolated neoantigenic peptide is encoded by a MSH3 gene. In related embodiments, AₓB_{y}C_{z} is

(SEQ ID NO: 98)

TKSTLIGEDVNPLIKLDDAVNVDEIMTDTSTSYLLCISENKENVRDKKKG
QHFYWHCGSAACHRRGCV
or

(SEQ ID NO: 99)

LYTKSTLIGEDVNPLIKLDDAVNVDEIMTDTSTSYLLCISENKENVRDKK
RATFLLALWECSLPQARLCLIVSRTLLLVQS.

[0225] In some embodiments, the isolated neoantigenic peptide is encoded by a NDUFC2 gene. In related embodiments, AₓB_{y}C_{z} is

(SEQ ID NO: 100)

LPPPKLTDPRLLYIGFLGYCSGLIDNLIRRRPIATAGLHRQLLYITAFFF
CWILSCKT,
or

(SEQ ID NO: 101)

SLPPPKLTDPRLLYIGFLGYCSGLIDNLIRRRPIATAGLHRQLLYITAFF
LLDIIL.

[0226] In some embodiments, the isolated neoantigenic peptide is encoded by a RBM27 gene. In related embodiments, AₓB_{y}C_{z} is

(SEQ ID NO: 102)

NQSGGAGEDCQIFSTPGHPKMIYSSSNLKTPSKLCSGSKSHDVQEVLKKK
TGSNEVTTRYEEKKTGSVRKANRMPKDVNIQVRKKQKHETRRKSKYNEDF
ERAWREDLTIKR.

[0227] In some embodiments, the isolated neoantigenic peptide is encoded by a RPL22 gene. In related embodiments, AₓB_{y}C_{z} is MAPVKKLVVKGGKKKEASSEVHS (SEQ ID NO: 103) or MAPVKKLVVKGGKKRSKF (SEQ ID NO: 104). In some related embodiments, the neoantigenic peptide is not VVKGGKKRSK (SEQ ID NO: 265) or VKGGKKRSK (SEQ ID NO: 266)

[0228] In some embodiments, the isolated neoantigenic peptide is encoded by a SEC31A gene. In related embodiments, AₓB_{y}C_{z} is MPSHQGAEQQQQQHHVFISQVVTEKEFLSRSDQLQQAVQSQGFINYCQKKN (SEQ ID NO: 105) or

(SEQ ID NO: 106)

MPSHQGAEQQQQQHHVFISQVVTEKEFLSRSDQLQQAVQSQGFINYCQKK
LMLLRLNLRKMCGPF.

[0229] In some embodiments, the isolated neoantigenic peptide is encoded by a SEC63 gene. In related embodiments, AₓB_{y}C_{z} is

(SEQ ID NO: 107)

AEVFEKEQSICAAEEQPAEDGQGETNKNRTKGGWQQKSKGPKKTAKSKKK
ETFKKKTYTCAITTVKATETKAGKWSRWE
or

(SEQ ID NO: 108)

MAEVFEKEQSICAAEEQPAEDGQGETNKNRTKGGWQQKSKGPKKTAKSKK
RNL.

[0230] In some embodiments, the isolated neoantigenic peptide is encoded by a SLC35F5 gene. In related embodiments, AₓB_{y}C_{z} is

(SEQ ID NO: 109)

NIMEIRQLPSSHALEAKLSRMSYPVKEQESILKTVGKLTATQVAKISFFF
ALCGFWQICHIKKHFQTHKLL.

[0231] In some embodiments, the isolated neoantigenic peptide is encoded by a SMAP1 gene. In related embodiments, AₓB_{y}C_{z} is YEKKKYYDKNAIAITNISSSDAPLQPLVSSPSLQAAVDKNKLEKEKEKKKGREKERKGARKAGKTTY S (SEQ ID NO: 110) or KYEKKKYYDKNAIAITNISSSDAPLQPLVSSPSLQAAVDKNKLEKEKEKKRKRKREKRSQKSRQNHL QLKSCRRKISNWSLKKVPALKKLRSPLWIF (SEQ ID NO: 111). In some related embodiments, the neoantigenic peptide is not ALKKLRSPL (SEQ ID NO: 267), KISNWSLKK (SEQ ID NO: 268), SLKKVPALK (SEQ ID NO: 269), KLRSPLWIF (SEQ ID NO: 270), KKRKRKREK (SEQ ID NO: 271), RKREKRSQK (SEQ ID NO: 272), RSQKSRQNH (SEQ ID NO: 273), SQKSRQNHL (SEQ ID NO: 274), KSRQNHLQL (SEQ ID NO: 275), RRKISNWSL (SEQ ID NO: 276), RKISNWSLK (SEQ ID NO: 277), KVPALKKLR (SEQ ID NO: 278), HLQLKSCRR (SEQ ID NO: 279), WSLKKVPAL (SEQ ID NO: 280), RQNHLQLKS (SEQ ID NO: 281), KKVPALKKL (SEQ ID NO: 282), LKKLRSPLW (SEQ ID NO: 283), KKLRSPLWI (SEQ ID NO: 284), KISNWSLKKV (SEQ ID NO: 285), KSRQNHLQLK (SEQ ID NO: 286), SLKKVPALKK (SEQ ID NO: 287), WSLKKVPALK (SEQ ID NO: 288), KRKREKRSQK (SEQ ID NO: 289), RSQKSRQNHL (SEQ ID NO: 290), HLQLKSCRRK (SEQ ID NO: 291), RRKISNWSLK (SEQ ID NO: 292), CRRKISNWSL (SEQ ID NO: 293), NWSLKKVPAL (SEQ ID NO: 294), QKSRQNHLQL (SEQ ID NO: 295), RQNHLQLKSC (SEQ ID NO: 296), LQLKSCRRKI (SEQ ID NO: 297), ALKKLRSPLW (SEQ ID NO: 298), or KKLRSPLWI (SEQ ID NO: 284)

[0232] In some embodiments, the isolated neoantigenic peptide is encoded by a TFAM gene. In related embodiments, AₓB_{y}C_{z} is

(SEQ ID NO: 112)

IYQDAYRAEWQVYKEEISRFKEQLTPSQIMSLEKEIMDKHLKRKAMTKKK
RVNTAWKTKKTSFSL
or

(SEQ ID NO: 113)

IYQDAYRAEWQVYKEEISRFKEQLTPSQIMSLEKEIMDKHLKRKAMTKKK
S.

[0233] In some embodiments, the isolated neoantigenic peptide is encoded by a TGFBR2 gene. In related embodiments, AₓB_{y}C_{z} is

(SEQ ID NO: 114)

KPQEVCVAVWRKNDENITLETVCHDPKLPYHDFILEDAASPKCIMKEKKK
AW
or

(SEQ ID NO: 115)

EKPQEVCVAVWRKNDENITLETVCHDPKLPYHDFILEDAASPKCIMKEKK
SLVRLSSCVPVALMSAMTTSSSQKNITPAILTCC.

[0234] In some embodiments, the isolated neoantigenic peptide is encoded by a THAP5 gene. In related embodiments, AₓB_{y}C_{z} is

(SEQ ID NO: 116)

VPSKYQFLCSDHFTPDSLDIRWGIRYLKQTAVPTIFSLPEDNQGKDPSKK
NPRRKTWKMRKKYAQKPSQKNHLY.

[0235] In some embodiments, the isolated neoantigenic peptide is encoded by a TTK gene. In related embodiments, AₓB_{y}C_{z} is

(SEQ ID NO: 117)

GTTEEMKYVLGQLVGLNSPNSILKAAKTLYEHYSGGESHNSSSSKTFEKK
GEKNDLQLFVMSDTTYKIYWTVILLNPCGNLHLKTTSL

[0236] In some embodiments, the isolated neoantigenic peptide is encoded by a XPOT gene. In related embodiments, AₓB_{y}C_{z} is

(SEQ ID NO: 118)

QQLIRETLISWLQAQMLNPQPEKTFIRNKAAQVFALLFVTEYLTKWPKF
FLTFSQ.

[0237] In some embodiments, the isolated neoantigenic peptide is encoded by a APC gene. In related embodiments, C_{z} is AKFQQCHSTLEPNPADCRVLVYLQNQPGTKLLNFLQERNLPPKVVLRHPKVHLNTMFRRPHSCLAD VLLSVHLIVLRVVRLPAPFRVNHAVEW (SEQ ID NO: 44), APVIFQIALDKPCHQAEVKHLHHLLKQLKPSEKYLKIKHLLLKRERVDLSKLQ (SEQ ID NO: 45), or MLQFRGSRFFQMLILYYILPRKVLQMDFLVHPA (SEQ ID NO: 46). In some related embodiments, the neoantigenic peptide is not ADVLLSVHL (SEQ ID NO: 299), ADVLLSVHLI (SEQ ID NO: 300), APFRVNHAV (SEQ ID NO: 301), ARHKAVEFL (SEQ ID NO: 302), CLADVLLSV (SEQ ID NO: 303), CLADVLLSVH (SEQ ID NO: 304), DVLLSVHLI (SEQ ID NO: 305), DVLLSVHLIV (SEQ ID NO: 306), FLQERNLPPK (SEQ ID NO: 307), FRVNHAVEW (SEQ ID NO: 308), HLIVLRVVR (SEQ ID NO: 309), HLIVLRVVRL (SEQ ID NO: 310), HLNTMFRRPH (SEQ ID NO: 311), HPKVHLNTM (SEQ ID NO: 312), HPKVHLNTMF (SEQ ID NO: 313), KAVEFLQER (SEQ ID NO: 314), KVHLNTMFR (SEQ ID NO: 315), KVHLNTMFRR (SEQ ID NO: 316), KVVLRHPKV (SEQ ID NO: 317), LLSVHLIVL (SEQ ID NO: 318), LLSVHLIVLR (SEQ ID NO: 319), LPAPFRVNH (SEQ ID NO: 320), LPAPFRVNHA (SEQ ID NO: 321), LQERNLPPKV (SEQ ID NO: 322), LRVVRLPAPF (SEQ ID NO: 323), LSVHLIVLR (SEQ ID NO: 324), LSVHLIVLRV (SEQ ID NO: 325), MFRRPHSCL (SEQ ID NO: 326), MFRRPHSCLA (SEQ ID NO: 327), NLPPKVVLR (SEQ ID NO: 328), NTMFRRPHSC (SEQ ID NO: 329), QERNLPPKV (SEQ ID NO: 330), RHPKVHLNTM (SEQ ID NO: 331), RNLPPKVVL (SEQ ID NO: 332), RNLPPKVVLR (SEQ ID NO: 333), RPHSCLADV (SEQ ID NO: 334), RPHSCLADVL (SEQ ID NO: 335), RVVRLPAPF (SEQ ID NO: 336), RVVRLPAPFR (SEQ ID NO: 337), SARHKAVEFL (SEQ ID NO: 338), SVHLIVLRV (SEQ ID NO: 339), SVHLIVLRVV (SEQ ID NO: 340), TMFRRPHSC (SEQ ID NO: 341), TMFRRPHSCL (SEQ ID NO: 342), VEFLQERNL (SEQ ID NO: 343), VLLSVHLIV (SEQ ID NO: 344), VLLSVHLIVL (SEQ ID NO: 345), VLRHPKVHL (SEQ ID NO: 346), VLRVVRLPA (SEQ ID NO: 347), VVRLPAPFR (SEQ ID NO: 348), or VVRLPAPFRV (SEQ ID NO: 349).

[0238] In some embodiments, the isolated neoantigenic peptide is encoded by a ARID1A gene. In related embodiments, C_{z} is ALGPHSRISCLPTQTRGCILLAATPRSSSSSSSNDMIPMAISSPPKAPLLAAPSPASRLQCINSNSRITSGQ WMAHMALLPSGTKGRCTACHTALGRGSLSSSSCPQPSPSLPASNKLPSLPLSKMYTTSMAMPILPLPQ LLLSADQQAAPRTNFHSSLAETVSLHPLAPMPSKTCHHK (SEQ ID NO: 47), AHQGFPAAKESRVIQLSLLSLLIPPLTCLASEALPRPLLALPPVLLSLAQDHSRLLQCQATRCHLGHPV ASRTASCILP (SEQ ID NO: 48), PILAATGTSVRTAARTWVPRAAIRVPDPAAVPDDHAGPGAECHGRPLLYTADSSLWTTRPQRVWST GPDSILQPAKSSPSAAAATLLPATTVPDPSCPTFVSAAATVSTITAPVLSASILPAAIPASTSAVPGSIPL PAVDDTAAPPEPAPLLTATGSVSLPAAATSAASTLDALPAGCVSSAPVSAVPANCLFPAALPSTAGAIS RFIWVSGILSPLNDLQ (SEQ ID NO: 49), PCRAGRRVPWAASLIHSRFLLMDNKAPAGMVNRARLHITTSKVLTLSSSSHPTPSNHRPRPLMPNLRI SSSHSLNHHSSSPLSLHTPSSHPSLHISSPRLHTPPSSRRHSSTPRASPPTHSHRLSLLTSSSNLSSQHPRR SPSRLRILSPSLSSPSKLPIPSSASLHRRSYLKIHLGLRHPQPPQ (SEQ ID NO: 50), RTNPTVRMRPHCVPFWTGRILLPSAASVCPIPFEACHLCQAMTLRCPNTQGCCSSWAS (SEQ ID NO: 51), or TNQALPKIEVICRGTPRCPSTVPPSPAQPYLRVSLPEDRYTQAWAPTSRTPWGAMVPRGVSMAHKVA TPGSQTIMPCPMPTTPVQAWLEA (SEQ ID NO: 52). In some related embodiments, the neoantigenic peptide is not AAWRSCIAL (SEQ ID NO: 350), AAWRSCIALW (SEQ ID NO: 351), AETVSLHPL (SEQ ID NO: 352), AETVSLHPLA (SEQ ID NO: 353), AHMALLPSG (SEQ ID NO: 354), ALWCASSVT (SEQ ID NO: 355), AMPILPLPQL (SEQ ID NO: 356), APLLAAPSPA (SEQ ID NO: 357), APRTNFHSS (SEQ ID NO: 358), APRTNFHSSL (SEQ ID NO: 359), ASNKLPSLPL (SEQ ID NO: 360), AWRSCIALW (SEQ ID NO: 361), CAGRWLWYCW (SEQ ID NO: 362), CIALWCASSV (SEQ ID NO: 363), CPQPSPSLPA (SEQ ID NO: 364), CRRAVSATSW (SEQ ID NO: 365), CTACHTALGR (SEQ ID NO: 366), DQQAAPRTNF (SEQ ID NO: 367), ETVSLHPLA (SEQ ID NO: 368), FHSSLAETV (SEQ ID NO: 369), GMYSPSRYPR (SEQ ID NO: 370), GQWMAHMAL (SEQ ID NO: 371), GQWMAHMALL (SEQ ID NO: 372), GRCTACHTAL (SEQ ID NO: 373), GTAWQLVPL (SEQ ID NO: 374), HMALLPSGT (SEQ ID NO: 375), HMALLPSGTK (SEQ ID NO: 376), HPLAPMPSK (SEQ ID NO: 377), HSSLAETVSL (SEQ ID NO: 378), HTALGRGSL (SEQ ID NO: 379), IALWCASSV (SEQ ID NO: 380), ILATPPSAA (SEQ ID NO: 381), ILATPPSAAW (SEQ ID NO: 382), IPMAISSPP (SEQ ID NO: 383), IPMAISSPPK (SEQ ID NO: 384), ISSPPKAPL (SEQ ID NO: 385), ISSPPKAPLL (SEQ ID NO: 386), ITSGQWMAHM (SEQ ID NO: 387), KGRCTACHT (SEQ ID NO: 388), KGRCTACHTA (SEQ ID NO: 389), KLPSLPLSK (SEQ ID NO: 390), KLPSLPLSKM (SEQ ID NO: 391), KMYTSMAM (SEQ ID NO: 392), KMYTSMAMP (SEQ ID NO: 393), LAAPSPASR (SEQ ID NO: 394), LAAPSPASRL (SEQ ID NO: 395), LAETVSLHPL (SEQ ID NO: 396), LATPPSAAW (SEQ ID NO: 397), LATPPSAAWR (SEQ ID NO: 398), LLAAPSPASR (SEQ ID NO: 399), LLLSADQQAA (SEQ ID NO: 400), LLSADQQAA (SEQ ID NO: 401), LPASNKLPS (SEQ ID NO: 402), LPASNKLPSL (SEQ ID NO: 403), LPLPQLLLS (SEQ ID NO: 404), LPLPQLLLSA (SEQ ID NO: 405), LPSLPLSKM (SEQ ID NO: 406), LPSLPLSKMY (SEQ ID NO: 407), LQCINSNSRI (SEQ ID NO: 408), LQCRRAVSA (SEQ ID NO: 409), LQCRRAVSAT (SEQ ID NO: 410), LSADQQAAPR (SEQ ID NO: 411), LSKMYTrSM (SEQ ID NO: 412), LSKMYTTSMA (SEQ ID NO: 413), LWCASSVTER (SEQ ID NO: 414), LWYCWPTWL (SEQ ID NO: 415), LWYCWPTWLR (SEQ ID NO: 416), MAHMALLPS (SEQ ID NO: 417), MALLPSGTK (SEQ ID NO: 418), MPILPLPQL (SEQ ID NO: 419), MPILPLPQLL (SEQ ID NO: 420), MYSPSRYPR (SEQ ID NO: 421), MYTSMAMPI (SEQ ID NO: 422), PMAISSPPK (SEQ ID NO: 423), QLVPLQCRR (SEQ ID NO: 424), QQAAPRTNF (SEQ ID NO: 425), QQAAPRTNFH (SEQ ID NO: 426), QWMAHMALL (SEQ ID NO: 427), RAVSATSWA (SEQ ID NO: 428), RAVSATSWAS (SEQ ID NO: 429), RCAGRWLWY (SEQ ID NO: 430), RCTACHTAL (SEQ ID NO: 431), RGTAWQLVPL (SEQ ID NO: 432), RLQCINSNSR (SEQ ID NO: 433), RRAVSATSW (SEQ ID NO: 434), RTNFHSSLA (SEQ ID NO: 435), RTNFHSSLAE (SEQ ID NO: 436), RTRCAGRWL (SEQ ID NO: 437), RTRCAGRWLW (SEQ ID NO: 438), RWLWYCWPT (SEQ ID NO: 439), RWLWYCWPTW (SEQ ID NO: 440), SAAWRSCIA (SEQ ID NO: 441), SAAWRSCIAL (SEQ ID NO: 442), SGQWMAHMAL (SEQ ID NO: 443), SKMYTTSMA (SEQ ID NO: 444), SKMYTSMAM (SEQ ID NO: 445), SMAMPILPL (SEQ ID NO: 446), SNKLPSLPL (SEQ ID NO: 447), SPASRLQCI (SEQ ID NO: 448), SPPKAPLLAA (SEQ ID NO: 449), SPSLPASNKL (SEQ ID NO: 450), SRITSGQWM (SEQ ID NO: 451), SSCPQPSPSL (SEQ ID NO: 452), SSLAETVSL (SEQ ID NO: 453), SSNDMIPMAI (SEQ ID NO: 454), SSSNDMIPM (SEQ ID NO: 455), SSSSNDMIPM (SEQ ID NO: 456), SSSSSSNDM (SEQ ID NO: 457), SSSSSSSNDM (SEQ ID NO: 458), TACHTALGR (SEQ ID NO: 459), TERTRCAGRW (SEQ ID NO: 460), TSMAMPILPL (SEQ ID NO: 461), TTSMAMPIL (SEQ ID NO: 462), TVSLHPLAPM (SEQ ID NO: 463), TWLRGTAWQL (SEQ ID NO: 464), VPLQCRRAV (SEQ ID NO: 465), VSLHPLAPM (SEQ ID NO: 466), VTERTRCAGR (SEQ ID NO: 467), WLRGTAWQL (SEQ ID NO: 468), WLRGTAWQLV (SEQ ID NO: 469), WLWYCWPTW (SEQ ID NO: 470), WLWYCWPTWL (SEQ ID NO: 471), WMAHMALLPS (SEQ ID NO: 472), WPTWLRGTA (SEQ ID NO: 473), WPTWLRGTAW (SEQ ID NO: 474), WYCWPTWLR (SEQ ID NO: 475), YPRSSSSSS (SEQ ID NO: 476), YPRSSSSSSS (SEQ ID NO: 477), YTTSMAMPI (SEQ ID NO: 478), or YTrSMAMPIL (SEQ ID NO: 479).

[0239] In some embodiments, the isolated neoantigenic peptide is encoded by a β2M gene. In related embodiments, C_{z} is RMERELKKWSIQTCLSARTGLSISCTTLNSPPLKKMSMPAV (SEQ ID NO: 53), or LCSRYSLFLAWRLSSVLQRFRFTHVIQQRMESQIS (SEQ ID NO: 54). In some related embodiments, the neoantigenic peptide is not ALAVLALLSF (SEQ ID NO: 480), ALLSFWPGGY (SEQ ID NO: 481), DSGLLTSSSR (SEQ ID NO: 482), ELLCVWVSSI (SEQ ID NO: 483), EWKVKFPEL (SEQ ID NO: 484), FPELLCVWV (SEQ ID NO: 485), FWPGGYPAY (SEQ ID NO: 486), GLLTSSSREW (SEQ ID NO: 487), KFPELLCVW (SEQ ID NO: 488), KFPELLCVWV (SEQ ID NO: 489), KVKFPELLC (SEQ ID NO: 490), KVKFPELLCV (SEQ ID NO: 491), LAVLALLSF (SEQ ID NO: 492), LAVLALLSFW (SEQ ID NO: 493), LLCVWVSSI (SEQ ID NO: 142), LLCVWVSSIR (SEQ ID NO: 494), LLSFWPGGY (SEQ ID NO: 495), LLTSSSREW (SEQ ID NO: 496), LLTSSSREWK (SEQ ID NO: 497), LSFWPGGYPA (SEQ ID NO: 498), LTSSSREWK (SEQ ID NO: 499), LTSSSREWKV (SEQ ID NO: 500), REWKVKFPE (SEQ ID NO: 501), REWKVKFPEL (SEQ ID NO: 502), SFWPGGYPA (SEQ ID NO: 503), SFWPGGYPAY (SEQ ID NO: 504), SSREWKVKF (SEQ ID NO: 505), SSSREWKVK (SEQ ID NO: 506), SSSREWKVKF (SEQ ID NO: 507), TSSSREWKV (SEQ ID NO: 508), TSSSREWKVK (SEQ ID NO: 509), VKFPELLCV (SEQ ID NO: 510), VKFPELLCVW (SEQ ID NO: 511), WKVKFPELL (SEQ ID NO: 512), or YPAYSKDSGL (SEQ ID NO: 513).

[0240] In some embodiments, the isolated neoantigenic peptide is encoded by a CDH1 gene. In related embodiments, C_{z} is RSACVTVKGPLASVGRHSLSKQDCKFLPFWGFLEEFLLC (SEQ ID NO: 55), IQWGTTrAPRPIRPPFLESKQNCSHFPTPLLASEDRRETGLFLPSAAQKMKKAHFLKTWFRSNPTKTK KARFSTASLAKELTHPLLVSLLLKEKQDG (SEQ ID NO: 56), PTDPFLGLRLGLHLQKVFHQSHAEYSGAPPPPPAPSGLRFWNPSRIAHISQLLSWPQKTEERLGYSSHQ LPRK (SEQ ID NO: 57), FCCSCCFFGGERWSKSPYCPQRMTPGTrFITMMKKEAEKRTRTLT (SEQ ID NO: 58), or WRRNCKAPVSLRKSVQTPARSSPARPDRTRRLPSLGVPGQPWALGAAASRRCCCCCRSPLGSARSRS PATLALTPRATRSRCPGATWREAASWAE (SEQ ID NO: 59).

[0241] In some embodiments, the isolated neoantigenic peptide is encoded by a GATA3 gene. In related embodiments, C_{z} is PGRPLQTHVLPEPHLALQPLQPHADHAHADAPAIQPVLWTTPPLQHGHRHGLEPCSMLTGPPARVPA VPFDLHFCRSSIMKPKRDGYMFLKAESKIMFATLQRSSLWCLCSNH (SEQ ID NO: 60) or PRPRRCTRHPACPLDHTTPPAWSPPWVRALLDAHRAPSESPCSPFRLAFLQEQYHEA (SEQ ID NO: 61). In some related embodiments, the neoantigenic peptide is not AALSRHNVL (SEQ ID NO: 514), ADAPAIQPV (SEQ ID NO: 515), ADAPAIQPVL (SEQ ID NO: 516), AESKIMFAT (SEQ ID NO: 517), AESKIMFATL (SEQ ID NO: 518), AIQPVLWTT (SEQ ID NO: 519), ALQPLQPHA (SEQ ID NO: 520), APAIQPVLW (SEQ ID NO: 521), ARVPAVPFDL (SEQ ID NO: 522), ATLQRSSLW (SEQ ID NO: 523), AVPFDLHFCR (SEQ ID NO: 524), CSMLTGPPA (SEQ ID NO: 525), CSMLTGPPAR (SEQ ID NO: 526), DLHFCRSSI (SEQ ID NO: 527), DLHFCRSSIM (SEQ ID NO: 528), EPHLALQPL (SEQ ID NO: 529), ESKIMFATL (SEQ ID NO: 530), FATLQRSSL (SEQ ID NO: 531), FATLQRSSLW (SEQ ID NO: 532), FCRSSIMKPK (SEQ ID NO: 533), FDLHFCRSSI (SEQ ID NO: 534), FLKAESKIM (SEQ ID NO: 535), FLKAESKIMF (SEQ ID NO: 536), GPPARVPAV (SEQ ID NO: 537), GYMFLKAESK (SEQ ID NO: 538), HADAPAIQPV (SEQ ID NO: 539), HAHADAPAI (SEQ ID NO: 540), HFCRSSIMK (SEQ ID NO: 541), HLALQPLQPH (SEQ ID NO: 542), HMSSLSHISA (SEQ ID NO: 543), HPLQHGHRH (SEQ ID NO: 544), HPPSSLSFW (SEQ ID NO: 545), HRHGLEPCSM (SEQ ID NO: 546), IMFATLQRS (SEQ ID NO: 547), IMFATLQRSS (SEQ ID NO: 548), IMKPKRDGY (SEQ ID NO: 549), IMKPKRDGYM (SEQ ID NO: 550), KAESKIMFA (SEQ ID NO: 551), KIMFATLQR (SEQ ID NO: 552), KPKRDGYMF (SEQ ID NO: 553), KPKRDGYMFL (SEQ ID NO: 554), LALQPLQPH (SEQ ID NO: 555), LHFCRSSIM (SEQ ID NO: 556), LHFCRSSIMK (SEQ ID NO: 557), LKAESKIMF (SEQ ID NO: 558), LQHGHRHGL (SEQ ID NO: 559), LQPHADHAH (SEQ ID NO: 560), LQRSSLWCL (SEQ ID NO: 561), LQRSSLWCLC (SEQ ID NO: 562), LSFGPHHPL (SEQ ID NO: 563), LSFGPHPPL (SEQ ID NO: 564), LSFWTTPPL (SEQ ID NO: 565), LSHISALQPL (SEQ ID NO: 566), MFATLQRSSL (SEQ ID NO: 567), MFLKAESKI (SEQ ID NO: 568), MFLKAESKIM (SEQ ID NO: 569), MHPPSSLSFW (SEQ ID NO: 570), MKPKRDGYMF (SEQ ID NO: 571), MLTGPPARV (SEQ ID NO: 572), MSSLSHISA (SEQ ID NO: 573), MSSLSHISAL (SEQ ID NO: 574), NPAALSRHNV (SEQ ID NO: 575), PARVPAVPF (SEQ ID NO: 576), PAVPFDLHF (SEQ ID NO: 577), PEPHLALQPL (SEQ ID NO: 578), PPARVPAVPF (SEQ ID NO: 579), QPVLWTTPPL (SEQ ID NO: 580), RHGLEPCSM (SEQ ID NO: 581), RHNVLPEPHL (SEQ ID NO: 582), RSSIMKPKR (SEQ ID NO: 583), SALQPLQPH (SEQ ID NO: 584), SHISALQPL (SEQ ID NO: 585), SIMKPKRDGY (SEQ ID NO: 586), SLSFGPHHPL (SEQ ID NO: 587), SLSFGPHPPL (SEQ ID NO: 588), SLSFWTTPPL (SEQ ID NO: 589), SMLTGPPAR (SEQ ID NO: 590), SMLTGPPARV (SEQ ID NO: 141), SSLSHISAL (SEQ ID NO: 591), TLQRSSLWCL (SEQ ID NO: 592), TTPPLQHGHR (SEQ ID NO: 593), VLPEPHLAL (SEQ ID NO: 594), VPAVPFDLHF (SEQ ID NO: 595), VPFDLHFCR (SEQ ID NO: 596), YMFLKAESK (SEQ ID NO: 597) or YMFLKAESKI (SEQ ID NO: 598).

[0242] In some embodiments, the isolated neoantigenic peptide is encoded by a MLL2 gene. In related embodiments, C_{z} is TRRCHCCPHLRSHPCPHHLRNHPRPHHLRHHACHHHLRNCPHPHFLRHCTCPGRWRNRPSLRRLRSL LCLPHLNHHLFLHWRSRPCLHRKSHPHLLHLRRLYPHHLKHRPCPHHLKNLLCPRHLRNCPLPRHLK HLACLHHLRSHPCPLHLKSHPCLHHRRHLVCSHHLKSLLCPLHLRSLPFPHHLRHHACPHHLRTRLCP HHLKNHLCPPHLRYRAYPPCLWCHACLHRLRNLPCPHRLRSLPRPLHLRLHASPHHLRTPPHPHHLR THLLPHHRRTRSCPCRWRSHPCCHYLRSRNSAPGPRGRTCHPGLRSRTCPPGLRSHTYLRRLRSHTCP PSLRSHAYALCLRSHTCPPRLRDHICPLSLRNCTCPPRLRSRTCLLCLRSHACPPNLRNHTCPPSLRSHA CPPGLRNRICPLSLRSHPCPLGLKSPLRSQANALHLRSCPCSLPLGNHPYLPCLESQPCLSLGNHLCPLC PRSCRCPHLGSHPCRLS (SEQ ID NO: 62). In some related embodiments, the neoantigenic peptide is not APGPRGRTC (SEQ ID NO: 599), CHYLRSRNSA (SEQ ID NO: 600), CLRSHTCPPR (SEQ ID NO: 601), CLWCHACLHR (SEQ ID NO: 602), CPHLGSHPC (SEQ ID NO: 603), CPHRLRSLPR (SEQ ID NO: 604), CPLGLKSPL (SEQ ID NO: 605), CPPGLRNRI (SEQ ID NO: 606), CPPGLRSHTY (SEQ ID NO: 607), CPPRLRDHI (SEQ ID NO: 608), CPPSLRSHAY (SEQ ID NO: 609), CPRSCRCPH (SEQ ID NO: 610), CPRSCRCPHL (SEQ ID NO: 611), CSLPLGNHPY (SEQ ID NO: 612), CTCPPRLRSR (SEQ ID NO: 613), DHICPLSLR (SEQ ID NO: 614), EESPMSPHL (SEQ ID NO: 615), ESPMSPHLR (SEQ ID NO: 616), ESPMSPHLRY (SEQ ID NO: 617), EVSRLSPCL (SEQ ID NO: 618), GLKSPLRSQA (SEQ ID NO: 619), GLRNRICPL (SEQ ID NO: 620), GLRNRICPLS (SEQ ID NO: 621), GLRSHTYLR (SEQ ID NO: 622), GLRSHTYLRR (SEQ ID NO: 623), GLRSRTCPPG (SEQ ID NO: 624), HACPPGLRNR (SEQ ID NO: 625), HAYALCLRSH (SEQ ID NO: 626), HHLRTHLLPH (SEQ ID NO: 627), HLGSHPCRL (SEQ ID NO: 628), HLLPHHRRTR (SEQ ID NO: 629), HLRLHASPH (SEQ ID NO: 630), HLRLHASPHH (SEQ ID NO: 631), HLRSCPCSL (SEQ ID NO: 632), HLRTHLLPH (SEQ ID NO: 633), HLRTHLLPHH (SEQ ID NO: 634), HLRTPPHPH (SEQ ID NO: 635), HLRTPPHPHH (SEQ ID NO: 636), HLRYRAYPP (SEQ ID NO: 637), HLRYRAYPPC (SEQ ID NO: 638), HPCCHYLRSR (SEQ ID NO: 639), HPHHLRTHL (SEQ ID NO: 640), HPHHLRTHLL (SEQ ID NO: 641), HRLRSLPRPL (SEQ ID NO: 642), HTYLRRLRS (SEQ ID NO: 643), HTYLRRLRSH (SEQ ID NO: 644), HYLRSRNSA (SEQ ID NO: 645), KSPLRSQANA (SEQ ID NO: 646), LESQPCLSL (SEQ ID NO: 647), LHLRLHASPH (SEQ ID NO: 648), LHLRSCPCSL (SEQ ID NO: 649), LLPHHRRTR (SEQ ID NO: 650), LPCPHRLRSL (SEQ ID NO: 651), LPHHRRTRS (SEQ ID NO: 652), LPHHRRTRSC (SEQ ID NO: 653), LPLGNHPYL (SEQ ID NO: 654), LPRPLHLRL (SEQ ID NO: 655), LRLHASPHHL (SEQ ID NO: 656), LRNCTCPPRL (SEQ ID NO: 657), LRNHTCPPSL (SEQ ID NO: 658), LRNRICPLSL (SEQ ID NO: 659), LRSCPCSLPL (SEQ ID NO: 660), LRSHACPPGL (SEQ ID NO: 661), LRSHACPPNL (SEQ ID NO: 662), LRSHAYALCL (SEQ ID NO: 663), LRSHTCPPRL (SEQ ID NO: 664), LRSHTCPPSL (SEQ ID NO: 665), LRSHTYLRRL (SEQ ID NO: 666), LRSLPRPLHL (SEQ ID NO: 667), LRSQANALHL (SEQ ID NO: 668), LRTPPHPHHL (SEQ ID NO: 669), LRYRAYPPCL (SEQ ID NO: 670), LSLGNHLCPL (SEQ ID NO: 671), LSLRSHPCPL (SEQ ID NO: 672), LWCHACLHRL (SEQ ID NO: 673), MSPHLRYRA (SEQ ID NO: 674), MSPHLRYRAY (SEQ ID NO: 675), NLPCPHRLR (SEQ ID NO: 676), NLRNHTCPP (SEQ ID NO: 677), PMSPHLRYR (SEQ ID NO: 678), PPRLRSRTCL (SEQ ID NO: 679), PPSLRSHAY (SEQ ID NO: 680), RAYPPCLWCH (SEQ ID NO: 681), RDHICPLSL (SEQ ID NO: 682), RGRTCHPGL (SEQ ID NO: 683), RGRTCHPGLR (SEQ ID NO: 684), RLHASPHHL (SEQ ID NO: 685), RLHASPHHLR (SEQ ID NO: 686), RLRDHICPL (SEQ ID NO: 687), RLRDHICPLS (SEQ ID NO: 688), RLRNLPCPH (SEQ ID NO: 689), RLRNLPCPHR (SEQ ID NO: 690), RLRSHTCPP (SEQ ID NO: 691), RLRSHTCPPS (SEQ ID NO: 692), RLRSLPRPL (SEQ ID NO: 693), RLRSLPRPLH (SEQ ID NO: 694), RLRSRTCLL (SEQ ID NO: 695), RLRSRTCLLC (SEQ ID NO: 696), RLSPCLWCHA (SEQ ID NO: 697), RNHTCPPSL (SEQ ID NO: 698), RNHTCPPSLR (SEQ ID NO: 699), RNLPCPHRLR (SEQ ID NO: 700), RNRICPLSL (SEQ ID NO: 701), RNRICPLSLR (SEQ ID NO: 702), RPLHLRLHA (SEQ ID NO: 703), RPLHLRLHAS (SEQ ID NO: 704), RSCPCRWRSH (SEQ ID NO: 705), RSCPCSLPL (SEQ ID NO: 706), RSHACPPGL (SEQ ID NO: 707), RSHACPPGLR (SEQ ID NO: 708), RSHACPPNL (SEQ ID NO: 709), RSHACPPNLR (SEQ ID NO: 710), RSHAYALCL (SEQ ID NO: 711), RSHAYALCLR (SEQ ID NO: 712), RSHPCCHYL (SEQ ID NO: 713), RSHPCCHYLR (SEQ ID NO: 714), RSHPCPLGL (SEQ ID NO: 715), RSHPCPLGLK (SEQ ID NO: 716), RSHTCPPRL (SEQ ID NO: 717), RSHTCPPRLR (SEQ ID NO: 718), RSHTCPPSL (SEQ ID NO: 719), RSHTCPPSLR (SEQ ID NO: 720), RSHTYLRRL (SEQ ID NO: 721), RSHTYLRRLR (SEQ ID NO: 722), RSLPRPLHL (SEQ ID NO: 723), RSLPRPLHLR (SEQ ID NO: 724), RSQANALHL (SEQ ID NO: 725), RSQANALHLR (SEQ ID NO: 726), RSRNSAPGP (SEQ ID NO: 727), RSRNSAPGPR (SEQ ID NO: 728), RSRTCLLCL (SEQ ID NO: 729), RSRTCLLCLR (SEQ ID NO: 730), RSRTCPPGL (SEQ ID NO: 731), RSRTCPPGLR (SEQ ID NO: 732), RTCHPGLRSR (SEQ ID NO: 733), RTHLLPHHR (SEQ ID NO: 734), RTHLLPHHRR (SEQ ID NO: 735), RTPPHPHHL (SEQ ID NO: 736), RTPPHPHHLR (SEQ ID NO: 737), RTRSCPCRW (SEQ ID NO: 738), RTRSCPCRWR (SEQ ID NO: 739), RWRSHPCCH (SEQ ID NO: 740), RWRSHPCCHY (SEQ ID NO: 741), RYRAYPPCL (SEQ ID NO: 742), RYRAYPPCLW (SEQ ID NO: 743), SHAYALCLR (SEQ ID NO: 744), SLGNHLCPL (SEQ ID NO: 745), SLPLGNHPY (SEQ ID NO: 746), SLPLGNHPYL (SEQ ID NO: 747), SLPRPLHLR (SEQ ID NO: 748), SLPRPLHLRL (SEQ ID NO: 749), SLRNCTCPPR (SEQ ID NO: 750), SLRSHACPPG (SEQ ID NO: 751), SLRSHAYAL (SEQ ID NO: 752), SLRSHAYALC (SEQ ID NO: 753), SLRSHPCPL (SEQ ID NO: 754), SLRSHPCPLG (SEQ ID NO: 755), SPHHLRTPP (SEQ ID NO: 756), SPHHLRTPPH (SEQ ID NO: 757), SPHLRYRAY (SEQ ID NO: 758), SPLRSQANAL (SEQ ID NO: 759), SPMSPHLRY (SEQ ID NO: 760), SPMSPHLRYR (SEQ ID NO: 761), SQANALHLR (SEQ ID NO: 762), SQANALHLRS (SEQ ID NO: 763), VSRLSPCLW (SEQ ID NO: 764), WRSHPCCHY (SEQ ID NO: 765), WRSHPCCHYL (SEQ ID NO: 766), YLPCLESQPC (SEQ ID NO: 767), YLRRLRSHTC (SEQ ID NO: 768), YLRSRNSAP (SEQ ID NO: 769), or YLRSRNSAPG (SEQ ID NO: 770).

[0243] In some embodiments, the isolated neoantigenic peptide is encoded by a PTEN gene. In related embodiments, C_{z} is SWKGTNWCNDMCIFITSGQIFKGTRGPRFLWGSKDQRQKGSNYSQSEALCVLL (SEQ ID NO: 63), KRTKCFTFG (SEQ ID NO: 64), PIFIQTLLLWDFLQKDLKAYTGTILMM (SEQ ID NO: 65), QKMILTKQIKTKPTDTFLQILR (SEQ ID NO: 66), GFWIQSIKTITRYTIFVLKDIMTPPNLIAELHNILLKTITHHS (SEQ ID NO: 67), NYSNVQWRNLQSSVCGLPAKGEDIFLQFRTHTTGRQVHVL (SEQ ID NO: 68), or YQSRVLPQTEQDAKKGQNVSLLGKYILHTRTRGNLRKSRKWKSM (SEQ ID NO: 69). In some related embodiments, the neoantigenic peptide is not KMLKRTKCF (SEQ ID NO: 771), MLKRTKCFT (SEQ ID NO: 772), LKRTKCFTF (SEQ ID NO: 773), MLKRTKCFTF (SEQ ID NO: 774), KQNKMLKRTK (SEQ ID NO: 775), KMLKRTKCFT (SEQ ID NO: 776), or NKMLKRTKCF (SEQ ID NO: 777).

[0244] In some embodiments, the isolated neoantigenic peptide is encoded by a TP53 gene. In related embodiments, C_{z} is SSQNARGCSPRGPCTSSSYTGGPCTSPLLAPVIFCPFPENLPGQLRFPSGLLAFWDSQVCDLHVLPCPQ QDVLPTGQDLPCAAVG (SEQ ID NO: 70), GAAPTMSAAQIAMVWPLLSILSEWKEICVWSIWMTETLFDIVWWCPMSRLRLALTVPPSTITCVTV PAWAA (SEQ ID NO: 71), TGGPSSPSSHWKTPVVIYWDGTALRCVFVPVLGETGAQRKRISARKGSLTSCPQGALSEHCPTTPAP LPSQRRNHWMENISPFRSVGVSASRCSES (SEQ ID NO: 72), FHTPARHPRPRHGHLQAVTAHDGGCEALPPP (SEQ ID NO: 73), CCPRTILNNGSLKTQVQMKLPECQRLLPPWPLHQQLLHRRPLHQPPPGPCHLLSLPRKPTRAATVSV WASCILGQPSL (SEQ ID NO: 74), VRKHFQTYGNYFLKTTFCPPCRPKQWMI (SEQ ID NO: 75), or LARTPLPSTRCFANWPRPALCSCGLIPHPRPAPASAPWPSTSSHST (SEQ ID NO: 76). In some related embodiments, the neoantigenic peptide is not APASAPWPST (SEQ ID NO: 778), APPWPLHQQL (SEQ ID NO: 779), APWPSTSSH (SEQ ID NO: 780), ASCILGQPSL (SEQ ID NO: 781), ATVSVWASCI (SEQ ID NO: 782), CQRLLPPWPL (SEQ ID NO: 783), HQPPPGPCHL (SEQ ID NO: 784), HQQLLHRRPL (SEQ ID NO: 785), IEQWFTEDQV (SEQ ID NO: 786), KLPECQRLL (SEQ ID NO: 787), KPTRAATVSV (SEQ ID NO: 788), KTYQGSYGFV (SEQ ID NO: 789), KTYQGSYVS (SEQ ID NO: 790), KTYQGSYVSV (SEQ ID NO: 791), LLSLPRKPTR (SEQ ID NO: 792), LPPWPLHQQL (SEQ ID NO: 793), LPRKPTRAA (SEQ ID NO: 794), LPRKPTRAAT (SEQ ID NO: 795), LSLPRKPTR (SEQ ID NO: 796), MKLPECQRL (SEQ ID NO: 797), MKLPECQRLL (SEQ ID NO: 798), MPEAAPPWPL (SEQ ID NO: 799), PEAAPPWPL (SEQ ID NO: 800), PTRAATVSV (SEQ ID NO: 801), QMKLPECQR (SEQ ID NO: 802), QQLLHRRPL (SEQ ID NO: 803), QQLLHRRPLH (SEQ ID NO: 804), QRLLPPWPL (SEQ ID NO: 805), QWFTEDQVQM (SEQ ID NO: 806), RAATVSVWA (SEQ ID NO: 807), RLLPPWPLH (SEQ ID NO: 808), RMPEAAPPW (SEQ ID NO: 809), RPAPASAPW (SEQ ID NO: 810), SLPRKPTRA (SEQ ID NO: 811), SLPRKPTRAA (SEQ ID NO: 812), SQKTYQGSYV (SEQ ID NO: 813), STPRPAPASA (SEQ ID NO: 814), SYGFVWASC (SEQ ID NO: 815), SYGFVWASCI (SEQ ID NO: 816), SYVSVWASC (SEQ ID NO: 817), SYVSVWASCI (SEQ ID NO: 818), TEDQVQMKL (SEQ ID NO: 819), TPRPAPASA (SEQ ID NO: 820), TPRPAPASAP (SEQ ID NO: 821), TRAATVSVW (SEQ ID NO: 822), TVSVWASCI (SEQ ID NO: 823), TVSVWASCIL (SEQ ID NO: 824), TYQGSYGFV (SEQ ID NO: 825), TYQGSYGFVW (SEQ ID NO: 826), TYQGSYVSV (SEQ ID NO: 827), TYQGSYVSVW (SEQ ID NO: 828), VSVWASCIL (SEQ ID NO: 829), WPLHQQLLH (SEQ ID NO: 830), WPSTSSHST (SEQ ID NO: 831), YGFVWASCI (SEQ ID NO: 832), YGFVWASCIL (SEQ ID NO: 833), YQGSYGFVW (SEQ ID NO: 834), YQGSYGFVWA (SEQ ID NO: 835), YQGSYVSVW (SEQ ID NO: 836), YQGSYVSVWA (SEQ ID NO: 837), YVSVWASCI (SEQ ID NO: 838), or YVSVWASCIL (SEQ ID NO: 839).

[0245] In some embodiments, the isolated neoantigenic peptide is encoded by a VHL gene. In related embodiments, C_{z} is ELQETGHRQVALRRSGRPPKCAERPGAADTGAHCTSTDGRLKISVETYTVSSQLLMVLMSLDLDTGL VPSLVSKCLILRVK (SEQ ID NO: 77), KSDASRLSGA (SEQ ID NO: 78), RTAYFCQYHTASVYSERAMPPGCPEPSQA (SEQ ID NO: 79), TRASPPRSSSAIAVRASCCPYGSTSTASRSPTQRCRLARAAASTATEVTFGSSEMQGHTMGFWLTKLN YLCHLSMLTDSLFLPISHCQCIL (SEQ ID NO: 80), SSLRITGDWTSSGRSTKIWKTTQMCRKTWSG (SEQ ID NO: 81), or RRRRGGVGRRGVRPGRVRPGGTGRRGGDGGRAAAARAALGELARALPGHLLQSQSARRAARMAQ LRRRAAALPNAAAWHGPPHPQLPRSPLALQRCRDTRWASG (SEQ ID NO: 82). In some related embodiments, the neoantigenic peptide is not CHLSMLTDSL (SEQ ID NO: 840), EMQGHTMGF (SEQ ID NO: 841), FLPISHCQC (SEQ ID NO: 842), FLPISHCQCI (SEQ ID NO: 843), FRDAGHTMGF (SEQ ID NO: 844), FWLTKLNYL (SEQ ID NO: 845), GFWLTKLNY (SEQ ID NO: 846), GFWLTKLNYL (SEQ ID NO: 847), GSSEMQGHTM (SEQ ID NO: 848), HLSMLTDSL (SEQ ID NO: 849), HLSMLTDSLF (SEQ ID NO: 850), HSYRGHLGSS (SEQ ID NO: 851), HTMGFWLTK (SEQ ID NO: 852), HTMGFWLTKL (SEQ ID NO: 853), KERCLQLSGA (SEQ ID NO: 854), KLNYLCHLSM (SEQ ID NO: 855), LFRDAGHTM (SEQ ID NO: 856), LNYLCHLSM (SEQ ID NO: 857), LNYLCHLSML (SEQ ID NO: 858), LPISHCQCI (SEQ ID NO: 859), LPISHCQCIL (SEQ ID NO: 860), LSMLTDSLF (SEQ ID NO: 861), LSMLTDSLFL (SEQ ID NO: 862), LTDSLFLPI (SEQ ID NO: 863), LTKLNYLCHL (SEQ ID NO: 864), MGFWLTKLNY (SEQ ID NO: 865), MLTDSLFLPI (SEQ ID NO: 866), MQGHTMGFW (SEQ ID NO: 867), MQGHTMGFWL (SEQ ID NO: 868), NYLCHLSML (SEQ ID NO: 869), RDAGHTMGF (SEQ ID NO: 870), RDAGHTMGFW (SEQ ID NO: 871), RGHLGSSEM (SEQ ID NO: 872), RIHSYRGHLG (SEQ ID NO: 873), SEMQGHTMG (SEQ ID NO: 874), SEMQGHTMGF (SEQ ID NO: 875), SLFLPISHC (SEQ ID NO: 876), SMLTDSLFL (SEQ ID NO: 877), SSEMQGHTM (SEQ ID NO: 878), TKLNYLCHL (SEQ ID NO: 879), TLKERCLQL (SEQ ID NO: 880), TMGFWLTKL (SEQ ID NO: 881), WLFRDAGHT (SEQ ID NO: 882), WLFRDAGHTM (SEQ ID NO: 883), YLCHLSMLT (SEQ ID NO: 884), or YRGHLGSSEM (SEQ ID NO: 885).

[0246] In some embodiments, the isolated neoantigenic peptide is encoded by a fusion of a first gene with a second gene. In some embodiments, the isolated neoantigenic peptide is encoded by an in-frame fusion of a first gene with a second gene.

[0247] In some embodiments, the isolated neoantigenic peptide is encoded by a BCR gene and an ABL gene. In related embodiments, AₓB_{y}C_{z} is

(SEQ ID NO: 119)

ERAEWRENIREQQKKCFRSFSLTSVELQMLTNSCVKLQTVHSIPLTINKE
EALQRPVASDFEPQGLSEAARWNSKENLLAGPSENDPNLFVALYDFVASG
or

(SEQ ID NO: 120)

ELQMLTNSCVKLQTVHSIPLTINKEDDESPGLYGFLNVIVHSATGFKQSS
KALQRPVASDFEPQGLSEAARWNSKENLLAGPSENDPNLFVALYDFVASG
D.

[0248] In some embodiments, the isolated neoantigenic peptide is encoded by a C11orf95 gene and a RELA gene. In related embodiments, AₓB_{y}C_{z} is

(SEQ ID NO: 121)

ISNSWDAHLGLGACGEAEGLGVQGAEEEEEEEEEEEEEGAGVPACPPKGP
ELFPLIFPAEPAQASGPYVEIIEQPKQRGMRFRYKCEGRSAGSIPGERST
D.

[0249] In some embodiments, the isolated neoantigenic peptide is encoded by a CBFB gene and an MYH11 gene.

(SEQ ID NO: 122)

LQRLDGMGCLEFDEERAQQEDALAQQAFEEARRRTREFEDRDRSHREEM
EVHELEKSKRALETQMEEMKTQLEELEDELQATEDAKLRLEVNMQALKG
QF.

[0250] In some embodiments, the isolated neoantigenic peptide is encoded by a CD74 gene and an ROS1 gene. In related embodiments, AₓB_{y}C_{z} is

(SEQ ID NO: 123)

KGSFPENLRHLKNTMETIDWKVFESWMHHWLLFEMSRHSLEQKPTDAP
PKAGVPNKPGIPKLLEGSKNSIQWEKAEDNGCRITYYILEIRKSTSNNL
QNQ.

[0251] In some embodiments, the isolated neoantigenic peptide is encoded by a EGFR gene and an SEPT14 gene. In related embodiments, AₓB_{y}C_{z} is the first native polypeptide is encoded by an gene and the second native polypeptide is encoded by

(SEQ ID NO: 124)

LPQPPICTIDVYMIMVKCWMIDADSRPKFRELIIEFSKMARDPQRYLVIQ
LQDKFEHLKMIQQEEIRKLEEEKKQLEGEIIDFYKMKAASEALQTQL
STD.

[0252] In some embodiments, the isolated neoantigenic peptide is encoded by a EGFR gene and an EGFR gene. In related embodiments, AₓB_{y}C_{z} is

(SEQ ID NO: 125)

MRPSGTAGAALLALLAALCPASRALEEKKGNYVVTDHGSCVRACGADSYE
MEEDGVRKCKKCEGPCRKVCNGIGIGEFKD.

[0253] In some embodiments, the isolated neoantigenic peptide is encoded by a EML4 gene and an ALK gene. In related embodiments, AₓB_{y}C_{z} is

(SEQ ID NO: 126)

SWENSDDSRNKLSKIPSTPKLIPKVTKTADKHKDVIINQAKMSTREKNSQ
VYRRKHQELQAMQMELQSPEYKLSKLRTSTIMTDYNPNYCFAGKTSSI
SDL.

[0254] In some embodiments, the isolated neoantigenic peptide is encoded by a FGFR3 gene and an TACC3 gene. In related embodiments, AₓB_{y}C_{z} is

(SEQ ID NO: 127)

EGHRMDKPANCTHDLYMIMRECWHAAPSQRPTFKQLVEDLDRVLTVTSTD
VKATQEENRELRSRCEELHGKNLELGKIMDRFEEVVYQAMEEVQKQK
ELS,

[0255] In some embodiments, the isolated neoantigenic peptide is encoded by a NAB gene and an STAT6 gene. In related embodiments, AₓB_{y}C_{z} is

(SEQ ID NO: 128)

RDNTLLLRRVELFSLSRQVARESTYLSSLKGSRLHPEELGGPPLKKLKQE
ATSKSQIMSLWGLVSKMPPEKVQRLYVDFPQHLRHLLGDWLESQPWEFLV
GSDAFCC.

[0256] In some embodiments, the isolated neoantigenic peptide is encoded by a NDRG1 gene and an ERG gene. In related embodiments, AₓB_{y}C_{z} is

(SEQ ID NO: 129)

MSREMQDVDLAEVKPLVEKGETITGLLQEFDVQEALSVVSEDQSLFECAY
GTPHLAKTEMTASSSSDYGQTSKMSPRVPQQDW.

[0257] In some embodiments, the isolated neoantigenic peptide is encoded by a TMPRSS2 gene and an ERG gene. In related embodiments, AₓB_{y}C_{z} is

(SEQ ID NO: 130)

MALNSEALSVVSEDQSLFECAYGTPHLAKTEMTASSSSDYGQTSKMSPRV
PQQDW.

[0258] In some embodiments, the isolated neoantigenic peptide is encoded by a PML gene and an RARA gene. In related embodiments, AₓB_{y}C_{z} is

(SEQ ID NO: 131)

VLDMHGFLRQALCRLRQEEPQSLQAAVRTDGFDEFKVRLQDLSSCITQGK
AIETQSSSSEEIVPSPPSPPPLPRIYKPCFVCQDKSSGYHYGVSACEG
CKG
or

(SEQ ID NO: 132)

RSSPEQPRPSTSKAVSPPHLDGPPSPRSPVIGSEVFLPNSNHVASGAGEA
AIETQSSSSEEIVPSPPSPPPLPRIYKPCFVCQDKSSGYHYGVSACEG
CKG.

[0259] In some embodiments, the isolated neoantigenic peptide is encoded by a RUNX1 gene and an CBFA2T1 (RUNX1T1) gene. In related embodiments, AₓB_{y}C_{z} is

(SEQ ID NO: 133)

VARFNDLRFVGRSGRGKSFTLTITVFTNPPQVATYHRAIKITVDGPREPR
NRTEKHSTMPDSPVDVKTQSRLTPPTMPPPPTTQGAPRTSSFTPTTLT
NGT

[0260] In some embodiments, the isolated neoantigenic peptide is encoded by a fusion of a first gene with an exon of a splice variant of the first gene. In some embodiments, the isolated neoantigenic peptide is encoded by a fusion of a first gene with a cryptic exon of the first gene.

[0261] In some embodiments, the isolated neoantigenic peptide is encoded by a AR-v7 gene and a cryptic exon encoded by the AR-v7 gene. In some embodiments, the isolated neoantigenic peptide is encoded by a AR-v7 gene comprising an exon of a splice variant of an AR gene. In related embodiments, AₓB_{y}C_{z} is

(SEQ ID NO: 134)

SCKVFFKRAAEGKQKYLCASRNDCTIDKFRRKNCPSCRLRKCYEAGMTLG
EKFRVGNCKHLKMTRP.

[0262] In some embodiments, the isolated neoantigenic peptide is encoded by a fusion of a first gene with a second gene, wherein the peptide comprises an amino acid sequence encoded by an out-of frame sequence resulting from the fusion.

[0263] In some embodiments, the isolated neoantigenic peptide is encoded by an AC011997.1 gene and a LRRC69 gene. In related embodiments, y is 1. In related embodiments, AₓB_{y}C_{z} is MAGAPPPASLPPCSLISDCCASNQRDSVGVGPSEPGNNIKICNESASRK (SEQ ID NO: 135).

(SEQ ID NO: 135)

MAGAPPPASLPPCSLISDCCASNQRDSVGVGPSEPGNNIKICNESASRK.

[0264] In some embodiments, the isolated neoantigenic peptide is encoded by an EEF1DP3 gene and a FRY gene. In related embodiments, y is 1. In related embodiments, AₓB_{y}C_{z} is

(SEQ ID NO: 136)

HGWRPFLPVRARSRWNRRLDVTVANGRSWKYGWSLLRVPQVNGIQVLNVS
LKSSSNVISY.

[0265] In some embodiments, the isolated neoantigenic peptide is encoded by an MAD1L1 gene and a MAFK gene. In related embodiments, y is 0. In related embodiments, AₓB_{y}C_{z} is

(SEQ ID NO: 137)

RLKEVFQTKIQEFRKACYTLTGYQIDITTENQYRLTSLYAEHPGDCLIFK
LRVPGSSVLVTVPGL.

[0266] In some embodiments, the isolated neoantigenic peptide is encoded by an PPP1R1B gene and a STARD3 gene. In related embodiments, y is 1. In related embodiments, AₓB_{y}C_{z} is

(SEQ ID NO: 138)

AEVLKVIRQSAGQKTTCGQGLEGPWERPPPLDESERDGGSEDQVEDPALS
ALLLRPRPPRPEVGAHQDEQAAQGADPRLGAQPACRGLPGLLTVPQPEPL
LAPPSAA.

[0267] In some embodiments, the isolated neoantigenic peptide comprises one or more of the peptide sequences depicted in Table 1. In some embodiments, the isolated neoantigenic peptide comprises one or more of the peptide sequences depicted in Table 1A, Table 1B, Table 1C, Table 1D, Table 1E, and/or Table 1F. In some embodiments, the isolated neoantigenic peptide does not comprise one or more of the peptide sequences depicted in Table 2. In some embodiments, the isolated neoantigenic peptide does not comprise one or more of the peptide sequences depicted in Table 2A, Table 2B, Table 2C, and/or Table 2D.

### Neoantigen Polynucleotides

[0268] Polynucleotides encoding each of the peptides described herein are also part of the invention. As appreciated by one of ordinary skill in the art, various nucleic acid sequences can encode the same peptide due to the redundancy of the genetic code. Each of these nucleic acids falls within the scope of the present invention. Nucleic acids encoding peptides can be DNA or RNA, for example, mRNA, or a combination of DNA and RNA. In some embodiments, a nucleic acid encoding a peptide is a self-amplifying mRNA. (Brito et al., Adv. Genet. 2015; 89:179-233). Any suitable polynucleotide that encodes a peptide described herein falls within the scope of this invention.

[0269] The term “RNA” includes and in some embodiments relates to “mRNA”. The term “mRNA” means “messenger-RNA” and relates to a “transcript” which is generated by using a DNA template and encodes a peptide or polypeptide. Typically, an mRNA comprises a 5′-UTR, a protein coding region, and a 3′-UTR. mRNA only possesses limited half-life in cells and in vitro. In some embodiments, the mRNA is self-amplifying mRNA. In the context of the present invention, mRNA may be generated by in vitro transcription from a DNA template. The in vitro transcription methodology is known to the skilled person. For example, there is a variety of in vitro transcription kits commercially available.

[0270] The stability and translation efficiency of RNA may be modified as required. For example, RNA may be stabilized and its translation increased by one or more modifications having a stabilizing effects and/or increasing translation efficiency of RNA. Such modifications are described, for example, in PCT/EP2006/009448 incorporated herein by reference. In order to increase expression of the RNA used according to the present invention, it may be modified within the coding region, i.e. the sequence encoding the expressed peptide or protein, without altering the sequence of the expressed peptide or protein, so as to increase the GC-content to increase mRNA stability and to perform a codon optimization and, thus, enhance translation in cells.

[0271] The term “modification” in the context of the RNA used in the present invention includes any modification of an RNA which is not naturally present in said RNA. In some embodiments of the invention, the RNA used according to the invention does not have uncapped 5′-triphosphates. Removal of such uncapped 5′-triphosphates can be achieved by treating RNA with a phosphatase. The RNA according to the invention may have modified ribonucleotides in order to increase its stability and/or decrease cytotoxicity. For example, In some embodiments, in the RNA used according to the invention 5-methylcytidine is substituted partially or completely, for example, completely, for cytidine. Alternatively or additionally, In some embodiments, in the RNA used according to the invention pseudouridine is substituted partially or completely, for example, completely, for uridine.

[0272] In some embodiments the term “modification” relates to providing an RNA with a 5′-cap or 5′-cap analog. The term “5′-cap” refers to a cap structure found on the 5′-end of an mRNA molecule and generally consists of a guanosine nucleotide connected to the mRNA via an unusual 5′ to 5′ triphosphate linkage. In some embodiments, this guanosine is methylated at the 7-position. The term “conventional 5′-cap” refers to a naturally occurring RNA 5′-cap, to the 7-methylguanosine cap (m G). In the context of the present invention, the term “5′-cap” includes a 5′-cap analog that resembles the RNA cap structure and is modified to possess the ability to stabilize RNA and/or enhance translation of RNA if attached thereto, in vivo and/or in a cell.

[0273] In certain embodiments, an mRNA encoding a neoantigen peptide of the invention is administered to a subject in need thereof. In some embodiments, the invention provides RNA, oligoribonucleotide, and polyribonucleotide molecules comprising a modified nucleoside, gene therapy vectors comprising same, gene therapy methods and gene transcription silencing methods comprising same. In some embodiments, the mRNA to be administered comprises at least one modified nucleoside.

[0274] The polynucleotides encoding peptides described herein can be synthesized by chemical techniques, for example, the phosphotriester method of Matteucci, et al., J. Am. Chem. Soc. 103:3185 (1981). Polynucleotides encoding peptides comprising or consisting of an analog can be made simply by substituting the appropriate and desired nucleic acid base(s) for those that encode the native epitope.

[0275] A large number of vectors and host systems suitable for producing and administering a neoantigenic peptide described herein are known to those of skill in the art, and are commercially available. The following vectors are provided by way of example. Bacterial: pQE70, pQE60, pQE-9 (Qiagen), pBS, pD10, phagescript, psiX174, pBluescript SK, pbsks, pNH8A, pNH16a, pNH18A, pNH46A (Stratagene); ptrc99a, pKK223-3, pKK233-3, pDR540, pRIT5 (Pharmacia); pCR (Invitrogen). Eukaryotic: pWLNEO, pSV2CAT, pOG44, pXT1, pSG (Stratagene) pSVK3, pBPV, pMSG, pSVL (Pharmacia); p75.6 (Valentis); pCEP (Invitrogen); pCEI (Epimmune). However, any other plasmid or vector can be used as long as it is replicable and viable in the host.

[0276] As representative examples of appropriate hosts, there can be mentioned: bacterial cells, such as E. coli, Bacillus subtilis, Salmonella typhimurium and various species within the genera Pseudomonas, Streptomyces, and Staphylococcus, fungal cells, such as yeast; insect cells such as Drosophila and Sf9; animal cells such as COS-7 lines of monkey kidney fibroblasts, described by Gluzman, Cell 23:175 (1981), and other cell lines capable of expressing a compatible vector, for example, the C127, 3T3, CHO, HeLa and BHK cell lines or Bowes melanoma; plant cells, etc. The selection of an appropriate host is deemed to be within the scope of those skilled in the art from the teachings herein.

[0277] Thus, the present invention is also directed to vectors, and expression vectors useful for the production and administration of the neoantigenic peptides described herein, and to host cells comprising such vectors.

[0278] Host cells are genetically engineered (transduced or transformed or transfected) with the vectors which can be, for example, a cloning vector or an expression vector. The vector can be, for example, in the form of a plasmid, a viral particle, a phage, etc. The engineered host cells can be cultured in conventional nutrient media modified as appropriate for activating promoters, selecting transformants or amplifying the polynucleotides. The culture conditions, such as temperature, pH and the like, are those previously used with the host cell selected for expression, and will be apparent to the ordinarily skilled artisan.

[0279] For expression of the neoantigenic peptides described herein, the coding sequence will be provided operably linked start and stop codons, promoter and terminator regions, and in some embodiments, and a replication system to provide an expression vector for expression in the desired cellular host. For example, promoter sequences compatible with bacterial hosts are provided in plasmids containing convenient restriction sites for insertion of the desired coding sequence. The resulting expression vectors are transformed into suitable bacterial hosts.

[0280] Generally, recombinant expression vectors will include origins of replication and selectable markers permitting transformation of the host cell, e.g., the ampicillin resistance gene of E. coli and S. cerevisiae TRP1 gene, and a promoter derived from a highly-expressed gene to direct transcription of a downstream structural sequence. Such promoters can be derived from operons encoding glycolytic enzymes such as 3-phosphoglycerate kinase (PGK), acid phosphatase, or heat shock proteins, among others. The heterologous structural sequence is assembled in appropriate phase with translation initiation and termination sequences, and in some embodiments, a leader sequence capable of directing secretion of translated protein into the periplasmic space or extracellular medium. Optionally, the heterologous sequence can encode a fusion protein including an N-terminal identification peptide imparting desired characteristics, e.g., stabilization or simplified purification of expressed recombinant product.

[0281] Yeast, insect or mammalian cell hosts can also be used, employing suitable vectors and control sequences. Examples of mammalian expression systems include the COS-7 lines of monkey kidney fibroblasts, described by Gluzman, Cell 23:175 (1981), and other cell lines capable of expressing a compatible vector, for example, the C127, 3T3, CHO, HeLa and BHK cell lines. Mammalian expression vectors will comprise an origin of replication, a suitable promoter and enhancer, and also any necessary ribosome binding sites, polyadenylation site, splice donor and acceptor sites, transcriptional termination sequences, and 5′ flanking nontranscribed sequences. Such promoters can also be derived from viral sources, such as, e.g., human cytomegalovirus (CMV-IE promoter) or herpes simplex virus type-1 (HSV TK promoter). Nucleic acid sequences derived from the SV40 splice, and polyadenylation sites can be used to provide the required nontranscribed genetic elements.

[0282] Polynucleotides encoding neoantigenic peptides described herein can also comprise a ubiquitination signal sequence, and/or a targeting sequence such as an endoplasmic reticulum (ER) signal sequence to facilitate movement of the resulting peptide into the endoplasmic reticulum.

[0283] Polynucleotides described herein can be administered and expressed in human cells (e.g., immune cells, including dendritic cells). A human codon usage table can be used to guide the codon choice for each amino acid. Such polynucleotides comprise spacer amino acid residues between epitopes and/or analogs, such as those described above, or can comprise naturally-occurring flanking sequences adjacent to the epitopes and/or analogs (and/or CTL, HTL, and B cell epitopes).

[0284] In some embodiments, a neoantigenic peptide described herein can also be administered/expressed by viral or bacterial vectors. Examples of expression vectors include attenuated viral hosts, such as vaccinia or fowlpox. As an example of this approach, vaccinia virus is used as a vector to express nucleotide sequences that encode the neoantigenic peptides described herein. Vaccinia vectors and methods useful in immunization protocols are described in, e.g., U.S. Pat. No. 4,722,848. Another vector is BCG (Bacille Calmette Guerin). BCG vectors are described by Stover et al., Nature 351:456-460 (1991). A wide variety of other vectors useful for therapeutic administration or immunization of the neoantigenic polypeptides described herein, e.g. adeno and adeno-associated virus vectors, retroviral vectors, Salmonella typhi vectors, detoxified anthrax toxin vectors, Sendai virus vectors, poxvirus vectors, canarypox vectors, and fowlpox vectors, and the like, will be apparent to those skilled in the art from the description herein. In some embodiments, the vector is Modified Vaccinia Ankara (VA) (e.g. Bavarian Noridic (MVA-BN)).

[0285] Standard regulatory sequences well known to those of skill in the art can be included in the vector to ensure expression in the human target cells. Several vector elements are desirable: a promoter with a downstream cloning site for polynucleotide, e.g., minigene insertion; a polyadenylation signal for efficient transcription termination; an E. coli origin of replication; and an E. coli selectable marker (e.g. ampicillin or kanamycin resistance). Numerous promoters can be used for this purpose, e.g., the human cytomegalovirus (hCMV) promoter. See, e.g., U.S. Pat. Nos. 5,580,859 and 5,589,466 for other suitable promoter sequences. In some embodiments, the promoter is the CMV-IE promoter.

[0286] Polynucleotides described herein can comprise one or more synthetic or naturally-occurring introns in the transcribed region. The inclusion of mRNA stabilization sequences and sequences for replication in mammalian cells can also be considered for increasing polynucleotide expression.

[0287] In addition, a polynucleotide described herein can comprise immunostimulatory sequences (ISSs or CpGs). These sequences can be included in the vector, outside the polynucleotide coding sequence to enhance immunogenicity.

[0288] In some embodiments, the size of at least one antigenic peptide molecule may comprise, but is not limited to, about 8, about 9, about 10, about 11, about 12, about 13, about 14, about 15, about 16, about 17, about 18, about 19, about 20, about 21, about 22, about 23, about 24, about 25, about 26, about 27, about 28, about 29, about 30, about 31, about 32, about 33, about 34, about 35, about 36, about 37, about 38, about 39, about 40, about 41, about 42, about 43, about 44, about 45, about 46, about 47, about 48, about 49, about 50, about 60, about 70, about 80, about 90, about 100, about 110, about 120 or greater amino molecule residues, and any range derivable therein.

[0289] In some embodiments, the antigenic peptide molecules are equal to or less than 50 amino acids. In some embodiments, the antigenic peptide molecules are equal to about 20 to about 30 amino acids. A longer peptide may be designed in several ways. For example, when the HLA-binding regions are predicted or known, a longer peptide may consist of either: individual binding peptides with an extension of 0-10 amino acids toward the N- and C-terminus of each corresponding gene product. A longer peptide may also consist of a concatenation of some or all of the binding peptides with extended sequences for each. In another case, when sequencing reveals a long (>10 residues) epitope sequence present in the diseased tissue (e.g. due to a frameshift, read-through or intron inclusion that leads to a novel peptide sequence), a longer peptide may consist of the entire stretch of novel disease-specific amino acids. In both cases, use of a longer peptide requires endogenous processing by professional antigen presenting cells such as dendritic cells and may lead to more effective antigen presentation and induction of T cell responses. In some embodiments, the extended sequence is altered to improve the biochemical properties of the polypeptide (properties such as solubility or stability) or to improve the likelihood for efficient proteasomal processing of the peptide.

[0290] The antigenic peptides and polypeptides may bind an HLA protein. In some embodiments, the antigenic peptides may bind an HLA protein with greater affinity than a corresponding native/wild-type peptide. The antigenic peptide may have an IC50 of about less than 1000 nM, about less than 500 nM, about less than 250 nM, about less than 200 nM, about less than 150 nM, about less than 100 nM, or about less than 50 nM. In some embodiments, the antigenic peptides do not induce an autoimmune response and/or invoke immunological tolerance when administered to a subject.

[0291] The invention also provides compositions comprising a plurality of antigenic peptides. Reference to antigenic peptides includes any suitable delivery modality that can result in introduction of the peptide into a subject's cell (e.g., nucleic acid). In some embodiments, the composition comprises at least 2 or more antigenic peptides. In some embodiments, the composition contains at least about 3, 4, 5, 6, 7, 8, 9, 10, 11, 12, 13, 14, 15, 16, 17, 18, 19, 20, 21, 22, 23, 24, 25, 26, 27, 28, 29, 30, 31, 32, 33, 34, 35, 36, 37, 38, 39, 40, 41, 42, 43, 44, 45, 46, 47, 48, 49, 50, 55, 60, 70, 80, 90, 100, 150, 200, 250, 300, 350, 400, 450, or 500 distinct peptides. In some embodiments, the composition contains at least one peptide from Table 1. In some embodiments, the composition contains at least one peptide from Table 1 and at least one other peptide from Table 1. In some embodiments, the composition contains at least one peptide from Table 1 and at least one other peptide from Table 2. In some embodiments the composition contains at least 20 distinct peptides. In some embodiments the composition contains at most 20 distinct peptides. According to the invention, 2 or more of the distinct peptides may be derived from the same polypeptide. For example, if an antigenic mutation encodes a polypeptide, two or more of the antigenic peptides may be derived from the polypeptide. In some embodiments, the two or more antigenic peptides derived from the polypeptide may comprise a tiled array that spans the polypeptide (e.g., the antigenic peptides may comprise a series of overlapping antigenic peptides that spans a portion, or all, of the polypeptide). Antigenic peptides can be derived from any protein coding gene. The antigenic peptides can be derived from mutations in human cancer or from an infectious agent or an autoimmune disease.

[0292] The antigenic peptides, polypeptides, and analogs can be further modified to contain additional chemical moieties not normally part of the protein. Those derivatized moieties can improve the solubility, the biological half-life, absorption of the protein, or binding affinity. The moieties can also reduce or eliminate any desirable side effects of the proteins and the like. An overview for those moieties can be found in Remington's Pharmaceutical Sciences, 20th ed., Mack Publishing Co., Easton, Pa. (2000). For example, antigenic peptides and polypeptides having the desired activity may be modified as necessary to provide certain desired attributes, e.g. improved pharmacological characteristics, while increasing or at least retaining substantially all of the biological activity of the unmodified peptide to bind the desired MHC molecule and activate the appropriate T cell. For instance, the antigenic peptide and polypeptides may be subject to various changes, such as substitutions, either conservative or non-conservative, where such changes might provide for certain advantages in their use, such as improved MHC binding. Such conservative substitutions may encompass replacing an amino acid residue with another amino acid residue that is biologically and/or chemically similar, e.g., one hydrophobic residue for another, or one polar residue for another. The effect of single amino acid substitutions may also be probed using D-amino acids. Such modifications may be made using well known peptide synthesis procedures, as described in e.g., Merrifield, Science 232:341-347 (1986), Barany & Merrifield, The Peptides, Gross & Meienhofer, eds. (N.Y., Academic Press), pp. 1-284 (1979); and Stewart & Young, Solid Phase Peptide Synthesis, (Rockford, III., Pierce), 2d Ed. (1984).

[0293] The antigenic peptide may also be modified by extending or decreasing the compound's amino acid sequence, e.g., by the addition or deletion of amino acids. The antigenic peptides, polypeptides, or analogs can also be modified by altering the order or composition of certain residues. It will be appreciated by the skilled artisan that certain amino acid residues essential for biological activity, e.g., those at critical contact sites or conserved residues, may generally not be altered without an adverse effect on biological activity. The non-critical amino acids need not be limited to those naturally occurring in proteins, such as L-a-amino acids, or their D-isomers, but may include non-natural amino acids as well, such as β-γ-δ-amino acids, as well as many derivatives of L-a-amino acids.

[0294] An antigen peptide may be optimized by using a series of peptides with single amino acid substitutions to determine the effect of electrostatic charge, hydrophobicity, etc. on MHC binding. For instance, a series of positively charged (e.g., Lys or Arg) or negatively charged (e.g., Glu) amino acid substitutions may be made along the length of the peptide revealing different patterns of sensitivity towards various MHC molecules and T cell receptors. In addition, multiple substitutions using small, relatively neutral moieties such as Ala, Gly, Pro, or similar residues may be employed. The substitutions may be homo-oligomers or hetero-oligomers. The number and types of residues which are substituted or added depend on the spacing necessary between essential contact points and certain functional attributes which are sought (e.g., hydrophobicity versus hydrophilicity). Increased binding affinity for an MHC molecule or T cell receptor may also be achieved by such substitutions, compared to the affinity of the parent peptide. In any event, such substitutions should employ amino acid residues or other molecular fragments chosen to avoid, for example, steric and charge interference which might disrupt binding. Amino acid substitutions are typically of single residues. Substitutions, deletions, insertions or any combination thereof may be combined to arrive at a final peptide.

[0295] An antigenic peptide may be modified to provide desired attributes. For instance, the ability of the peptides to induce CTL activity can be enhanced by linkage to a sequence which contains at least one epitope that is capable of inducing a T helper cell response. In some embodiments, immunogenic peptides/T helper conjugates are linked by a spacer molecule. In some embodiments, a spacer comprises relatively small, neutral molecules, such as amino acids or amino acid mimetics, which are substantially uncharged under physiological conditions. Spacers can be selected from, e.g., Ala, Gly, or other neutral spacers of nonpolar amino acids or neutral polar amino acids. It will be understood that the optionally present spacer need not be comprised of the same residues and thus may be a hetero- or homo-oligomer. The -antigenic peptide may be linked to the T helper peptide either directly or via a spacer either at the amino or carboxy terminus of the peptide. The amino terminus of either the antigenic peptide or the T helper peptide may be acylated. Exemplary T helper peptides include tetanus toxoid 830-843, influenza 307-319, malaria circumsporozoite 382-398 and 378-389.

[0296] The present invention is based, at least in part, on the ability to present the immune system of the patient with one or more disease-specific antigens. One of skill in the art from this disclosure and the knowledge in the art will appreciate that there are a variety of ways in which to produce such disease specific antigens. In general, such disease specific antigens may be produced either in vitro or in vivo. Disease specific antigens may be produced in vitro as peptides or polypeptides, which may then be formulated into a vaccine or immunogenic composition and administered to a subject. As described in further detail herein, such in vitro production may occur by a variety of methods known to one of skill in the art such as, for example, peptide synthesis or expression of a peptide/polypeptide from a DNA or RNA molecule in any of a variety of bacterial, eukaryotic, or viral recombinant expression systems, followed by purification of the expressed peptide/polypeptide. Alternatively, disease specific antigens may be produced in vivo by introducing molecules (e.g., DNA, RNA, viral expression systems, and the like) that encode disease specific antigens into a subject, whereupon the encoded disease specific antigens are expressed. The methods of in vitro and in vivo production of antigens is also further described herein as it relates to pharmaceutical compositions and methods of delivery of the therapy.

[0297] In some embodiments, the present invention includes modified antigenic peptides. A modification can include a covalent chemical modification that does not alter the primary amino acid sequence of the antigenic peptide itself. Modifications can produce peptides with desired properties, for example, prolonging the in vivo half-life, increasing the stability, reducing the clearance, altering the immunogenicity or allergenicity, enabling the raising of particular antibodies, cellular targeting, antigen uptake, antigen processing, MHC affinity, MHC stability, or antigen presentation. Changes to an antigenic peptide that may be carried out include, but are not limited to, conjugation to a carrier protein, conjugation to a ligand, conjugation to an antibody, PEGylation, polysialylation HESylation, recombinant PEG mimetics, Fc fusion, albumin fusion, nanoparticle attachment, nanoparticulate encapsulation, cholesterol fusion, iron fusion, acylation, amidation, glycosylation, side chain oxidation, phosphorylation, biotinylation, the addition of a surface active material, the addition of amino acid mimetics, or the addition of unnatural amino acids.

[0298] Issues associated with short plasma half-life or susceptibility to protease degradation may be overcome by various modifications, including conjugating or linking the polypeptide sequence to any of a variety of non-proteinaceous polymers, e.g., polyethylene glycol (PEG), polypropylene glycol, or polyoxyalkylenes (see, for example, typically via a linking moiety covalently bound to both the protein and the nonproteinaceous polymer, e.g., a PEG). Such PEG conjugated biomolecules have been shown to possess clinically useful properties, including better physical and thermal stability, protection against susceptibility to enzymatic degradation, increased solubility, longer in vivo circulating half-life and decreased clearance, reduced immunogenicity and antigenicity, and reduced toxicity.

[0299] PEGs suitable for conjugation to a polypeptide sequence are generally soluble in water at room temperature, and have the general formula R(0-CH2-CH2)nO-R, where R is hydrogen or a protective group such as an alkyl or an alkanol group, and where n is an integer from 1 to 1000. When R is a protective group, it generally has from 1 to 8 carbons. The PEG conjugated to the polypeptide sequence can be linear or branched. Branched PEG derivatives, “star-PEGs” and multi-armed PEGs are contemplated by the present disclosure.

[0300] The present disclosure also contemplates compositions of conjugates wherein the PEGs have different n values and thus the various different PEGs are present in specific ratios. For example, some compositions comprise a mixture of conjugates where n=1, 2, 3 and 4. In some compositions, the percentage of conjugates where n=1 is 18-25%, the percentage of conjugates where n=2 is 50-66%, the percentage of conjugates where n=3 is 12-16%, and the percentage of conjugates where n=4 is up to 5%. Such compositions can be produced by reaction conditions and purification methods know in the art. For example, cation exchange chromatography may be used to separate conjugates, and a fraction is then identified which contains the conjugate having, for example, the desired number of PEGs attached, purified free from unmodified protein sequences and from conjugates having other numbers of PEGs attached.

[0301] PEG may be bound to a polypeptide of the present disclosure via a terminal reactive group (a “spacer”). The spacer is, for example, a terminal reactive group which mediates a bond between the free amino or carboxyl groups of one or more of the polypeptide sequences and polyethylene glycol. The PEG having the spacer which may be bound to the free amino group includes N-hydroxysuccinylimide polyethylene glycol which may be prepared by activating succinic acid ester of polyethylene glycol with N-hydroxy succinylimide. Another activated polyethylene glycol which may be bound to a free amino group is 2,4-bis(0-methoxypolyethyleneglycol)-6-chloro-s-triazine which may be prepared by reacting polyethylene glycol monomethyl ether with cyanuric chloride. The activated polyethylene glycol which is bound to the free carboxyl group includes polyoxyethylenediamine.

[0302] Conjugation of one or more of the polypeptide sequences of the present disclosure to PEG having a spacer may be carried out by various conventional methods. For example, the conjugation reaction can be carried out in solution at a pH of from 5 to 10, at temperature from 4° C. to room temperature, for 30 minutes to 20 hours, utilizing a molar ratio of reagent to protein of from 4:1 to 30:1. Reaction conditions may be selected to direct the reaction towards producing predominantly a desired degree of substitution. In general, low temperature, low pH (e.g., pH=5), and short reaction time tend to decrease the number of PEGs attached, whereas high temperature, neutral to high pH (e.g., pH >7), and longer reaction time tend to increase the number of PEGs attached. Various means known in the art may be used to terminate the reaction. In some embodiments the reaction is terminated by acidifying the reaction mixture and freezing at, e.g., −20° C.

[0303] The present disclosure also contemplates the use of PEG mimetics. Recombinant PEG mimetics have been developed that retain the attributes of PEG (e.g., enhanced serum half-life) while conferring several additional advantageous properties. By way of example, simple polypeptide chains (comprising, for example, Ala, Glu, Gly, Pro, Ser and Thr) capable of forming an extended conformation similar to PEG can be produced recombinantly already fused to the peptide or protein drug of interest (e.g., Amunix′ XTEN technology; Mountain View, Calif.). This obviates the need for an additional conjugation step during the manufacturing process. Moreover, established molecular biology techniques enable control of the side chain composition of the polypeptide chains, allowing optimization of immunogenicity and manufacturing properties.

[0304] Glycosylation can affect the physical properties of proteins and can also be important in protein stability, secretion, and subcellular localization. Proper glycosylation can be important for biological activity. In fact, some genes from eukaryotic organisms, when expressed in bacteria (e.g., E. coli) which lack cellular processes for glycosylating proteins, yield proteins that are recovered with little or no activity by virtue of their lack of glycosylation. Addition of glycosylation sites can be accomplished by altering the amino acid sequence. The alteration to the polypeptide may be made, for example, by the addition of, or substitution by, one or more serine or threonine residues (for O-linked glycosylation sites) or asparagine residues (for N-linked glycosylation sites). The structures of N-linked and O-linked oligosaccharides and the sugar residues found in each type may be different. One type of sugar that is commonly found on both is N-acetylneuraminic acid (hereafter referred to as sialic acid). Sialic acid is usually the terminal residue of both N-linked and O-linked oligosaccharides and, by virtue of its negative charge, may confer acidic properties to the glycoprotein. Embodiments of the present disclosure comprise the generation and use of N-glycosylation variants.

[0305] The polypeptide sequences of the present disclosure may optionally be altered through changes at the DNA level, particularly by mutating the DNA encoding the polypeptide at preselected bases such that codons are generated that will translate into the desired amino acids. Another means of increasing the number of carbohydrate moieties on the polypeptide is by chemical or enzymatic coupling of glycosides to the polypeptide. Removal of carbohydrates may be accomplished chemically or enzymatically, or by substitution of codons encoding amino acid residues that are glycosylated. Chemical deglycosylation techniques are known, and enzymatic cleavage of carbohydrate moieties on polypeptides can be achieved by the use of a variety of endo- and exo-glycosidases.

[0306] Additional suitable components and molecules for conjugation include, for example, molecules for targeting to the lymphatic system, thyroglobulin; albumins such as human serum albumin (HAS); tetanus toxoid; Diphtheria toxoid; polyamino acids such as poly(D-lysine:D-glutamic acid); VP6 polypeptides of rotaviruses; influenza virus hemaglutinin, influenza virus nucleoprotein; Keyhole Limpet Hemocyanin (KLH); and hepatitis B virus core protein and surface antigen; or any combination of the foregoing.

[0307] Fusion of albumin to one or more polypeptides of the present disclosure can, for example, be achieved by genetic manipulation, such that the DNA coding for HSA, or a fragment thereof, is joined to the DNA coding for the one or more polypeptide sequences. Thereafter, a suitable host can be transformed or transfected with the fused nucleotide sequences in the form of, for example, a suitable plasmid, so as to express a fusion polypeptide. The expression may be effected in vitro from, for example, prokaryotic or eukaryotic cells, or in vivo from, for example, a transgenic organism. In some embodiments of the present disclosure, the expression of the fusion protein is performed in mammalian cell lines, for example, CHO cell lines. Transformation is used broadly herein to refer to the genetic alteration of a cell resulting from the direct uptake, incorporation and expression of exogenous genetic material (exogenous DNA) from its surroundings and taken up through the cell membrane(s). Transformation occurs naturally in some species of bacteria, but it can also be effected by artificial means in other cells. Furthermore, albumin itself may be modified to extend its circulating half-life. Fusion of the modified albumin to one or more polypeptides can be attained by the genetic manipulation techniques described above or by chemical conjugation; the resulting fusion molecule has a half-life that exceeds that of fusions with non-modified albumin. (See WO2011/051489). Several albumin-binding strategies have been developed as alternatives for direct fusion, including albumin binding through a conjugated fatty acid chain (acylation). Because serum albumin is a transport protein for fatty acids, these natural ligands with albumin-binding activity have been used for half-life extension of small protein therapeutics. For example, insulin detemir (LEVEMIR), an approved product for diabetes, comprises a myristyl chain conjugated to a genetically-modified insulin, resulting in a long-acting insulin analog.

[0308] Another type of modification is to conjugate (e.g., link) one or more additional components or molecules at the N- and/or C-terminus of a polypeptide sequence, such as another protein (e.g., a protein having an amino acid sequence heterologous to the subject protein), or a carrier molecule. Thus, an exemplary polypeptide sequence can be provided as a conjugate with another component or molecule.

[0309] A conjugate modification may result in a polypeptide sequence that retains activity with an additional or complementary function or activity of the second molecule. For example, a polypeptide sequence may be conjugated to a molecule, e.g., to facilitate solubility, storage, in vivo or shelf half-life or stability, reduction in immunogenicity, delayed or controlled release in vivo, etc. Other functions or activities include a conjugate that reduces toxicity relative to an unconjugated polypeptide sequence, a conjugate that targets a type of cell or organ more efficiently than an unconjugated polypeptide sequence, or a drug to further counter the causes or effects associated with a disorder or disease as set forth herein (e.g., diabetes).

[0310] A polypeptide may also be conjugated to large, slowly metabolized macromolecules such as proteins; polysaccharides, such as sepharose, agarose, cellulose, cellulose beads; polymeric amino acids such as polyglutamic acid, polylysine; amino acid copolymers; inactivated virus particles; inactivated bacterial toxins such as toxoid from diphtheria, tetanus, cholera, leukotoxin molecules; inactivated bacteria; and dendritic cells.

[0311] Additional candidate components and molecules for conjugation include those suitable for isolation or purification. Particular non-limiting examples include binding molecules, such as biotin (biotin-avidin specific binding pair), an antibody, a receptor, a ligand, a lectin, or molecules that comprise a solid support, including, for example, plastic or polystyrene beads, plates or beads, magnetic beads, test strips, and membranes. Purification methods such as cation exchange chromatography may be used to separate conjugates by charge difference, which effectively separates conjugates into their various molecular weights. The content of the fractions obtained by cation exchange chromatography may be identified by molecular weight using conventional methods, for example, mass spectroscopy, SDS-PAGE, or other known methods for separating molecular entities by molecular weight.

[0312] In some embodiments, the amino- or carboxyl-terminus of a polypeptide sequence of the present disclosure can be fused with an immunoglobulin Fc region (e.g., human Fc) to form a fusion conjugate (or fusion molecule). Fc fusion conjugates have been shown to increase the systemic half-life of biopharmaceuticals, and thus the biopharmaceutical product may require less frequent administration.

[0313] Fc binds to the neonatal Fc receptor (FcRn) in endothelial cells that line the blood vessels, and, upon binding, the Fc fusion molecule is protected from degradation and re-released into the circulation, keeping the molecule in circulation longer. This Fc binding is believed to be the mechanism by which endogenous IgG retains its long plasma half-life. More recent Fc-fusion technology links a single copy of a biopharmaceutical to the Fc region of an antibody to optimize the pharmacokinetic and pharmacodynamic properties of the biopharmaceutical as compared to traditional Fc-fusion conjugates.

[0314] The present disclosure contemplates the use of other modifications, currently known or developed in the future, of the polypeptides to improve one or more properties. One such method for prolonging the circulation half-life, increasing the stability, reducing the clearance, or altering the immunogenicity or allergenicity of a polypeptide of the present disclosure involves modification of the polypeptide sequences by hesylation, which utilizes hydroxyethyl starch derivatives linked to other molecules in order to modify the molecule's characteristics. Various aspects of hesylation are described in, for example, U.S. Patent Appln. Nos. 2007/0134197 and 2006/0258607.

[0315] Proteins or peptides may be made by any technique known to those of skill in the art, including the expression of proteins, polypeptides or peptides through standard molecular biological techniques, the isolation of proteins or peptides from natural sources, in vitro translation, or the chemical synthesis of proteins or peptides.

[0316] Peptides can be readily synthesized chemically utilizing reagents that are free of contaminating bacterial or animal substances (Merrifield RB: Solid phase peptide synthesis. I. The synthesis of a tetrapeptide. J. Am. Chem. Soc. 85:2149-54, 1963). In some embodiments, antigenic peptides are prepared by (1) parallel solid-phase synthesis on multi-channel instruments using uniform synthesis and cleavage conditions; (2) purification over a RP-HPLC column with column stripping; and re-washing, but not replacement, between peptides; followed by (3) analysis with a limited set of the most informative assays. The Good Manufacturing Practices (GMP) footprint can be defined around the set of peptides for an individual patient, thus requiring suite changeover procedures only between syntheses of peptides for different patients.

[0317] Alternatively, a nucleic acid (e.g., a polynucleotide) encoding an antigenic peptide of the invention may be used to produce the antigenic peptide in vitro. The polynucleotide may be, e.g., DNA, cDNA, PNA, CNA, RNA, either single- and/or double-stranded, or native or stabilized forms of polynucleotides, such as e.g. polynucleotides with a phosphorothiate backbone, or combinations thereof and it may or may not contain introns so long as it codes for the peptide. In some embodiments in vitro translation is used to produce the peptide. An expression vector capable of expressing a polypeptide can also be prepared. Expression vectors for different cell types are well known in the art and can be selected without undue experimentation. Generally, the DNA is inserted into an expression vector, such as a plasmid, in proper orientation and correct reading frame for expression. If necessary, the DNA may be linked to the appropriate transcriptional and translational regulatory control nucleotide sequences recognized by the desired host (e.g., bacteria), although such controls are generally available in the expression vector. The vector is then introduced into the host bacteria for cloning using standard techniques (see, e.g., Sambrook et al. (1989) Molecular Cloning, A Laboratory Manual, Cold Spring Harbor Laboratory, Cold Spring Harbor, N.Y.).

[0318] Expression vectors comprising the isolated polynucleotides, as well as host cells containing the expression vectors, are also contemplated. The antigenic peptides may be provided in the form of RNA or cDNA molecules encoding the desired antigenic peptides. One or more antigenic peptides of the invention may be encoded by a single expression vector.

[0319] In some embodiments, the polynucleotides may comprise the coding sequence for the disease specific antigenic peptide fused in the same reading frame to a polynucleotide which aids, for example, in expression and/or secretion of a polypeptide from a host cell (e.g., a leader sequence which functions as a secretory sequence for controlling transport of a polypeptide from the cell). The polypeptide having a leader sequence is a preprotein and can have the leader sequence cleaved by the host cell to form the mature form of the polypeptide.

[0320] In some embodiments, the polynucleotides can comprise the coding sequence for the disease specific antigenic peptide fused in the same reading frame to a marker sequence that allows, for example, for purification of the encoded polypeptide, which may then be incorporated into a personalized disease vaccine or immunogenic composition. For example, the marker sequence can be a hexa-histidine tag (SEQ ID NO: 1834) supplied by a pQE-9 vector to provide for purification of the mature polypeptide fused to the marker in the case of a bacterial host, or the marker sequence can be a hemagglutinin (HA) tag derived from the influenza hemagglutinin protein when a mammalian host (e.g., COS-7 cells) is used. Additional tags include, but are not limited to, Calmodulin tags, FLAG tags, Myc tags, S tags, SBP tags, Softag 1, Softag 3, VS tag, Xpress tag, Isopeptag, SpyTag, Biotin Carboxyl Carrier Protein (BCCP) tags, GST tags, fluorescent protein tags (e.g., green fluorescent protein tags), maltose binding protein tags, Nus tags, Strep-tag, thioredoxin tag, TC tag, Ty tag, and the like.

[0321] In some embodiments, the polynucleotides may comprise the coding sequence for one or more of the disease specific antigenic peptides fused in the same reading frame to create a single concatamerized antigenic peptide construct capable of producing multiple antigenic peptides.

[0322] In some embodiments, isolated nucleic acid molecules having a nucleotide sequence at least 60% identical, at least 65% identical, at least 70% identical, at least 75% identical, at least 80% identical, at least 85% identical, at least 90%/0 identical, at least 95% identical, or at least 96%, 97%, 98% or 99% identical to a polynucleotide encoding a disease specific antigenic peptide of the present invention, can be provided.

[0323] The isolated disease specific antigenic peptides described herein can be produced in vitro (e.g., in the laboratory) by any suitable method known in the art. Such methods range from direct protein synthetic methods to constructing a DNA sequence encoding isolated polypeptide sequences and expressing those sequences in a suitable transformed host. In some embodiments, a DNA sequence is constructed using recombinant technology by isolating or synthesizing a DNA sequence encoding a wild-type protein of interest. Optionally, the sequence can be mutagenized by site-specific mutagenesis to provide functional analogs thereof. See, e.g. Zoeller et al., Proc. Nat'l. Acad. Sci. USA 81:5662-5066 (1984) and U.S. Pat. No. 4,588,585.

[0324] In some embodiments, a DNA sequence encoding a polypeptide of interest would be constructed by chemical synthesis using an oligonucleotide synthesizer. Such oligonucleotides can be designed based on the amino acid sequence of the desired polypeptide and selecting those codons that are favored in the host cell in which the recombinant polypeptide of interest is produced. Standard methods can be applied to synthesize an isolated polynucleotide sequence encoding an isolated polypeptide of interest. For example, a complete amino acid sequence can be used to construct a back-translated gene. Further, a DNA oligomer containing a nucleotide sequence coding for the particular isolated polypeptide can be synthesized. For example, several small oligonucleotides coding for portions of the desired polypeptide can be synthesized and then ligated. The individual oligonucleotides typically contain 5′ or 3′ overhangs for complementary assembly

[0325] Once assembled (e.g., by synthesis, site-directed mutagenesis, or another method), the polynucleotide sequences encoding a particular isolated polypeptide of interest is inserted into an expression vector and optionally operatively linked to an expression control sequence appropriate for expression of the protein in a desired host. Proper assembly can be confirmed by nucleotide sequencing, restriction mapping, and expression of a biologically active polypeptide in a suitable host. As well known in the art, in order to obtain high expression levels of a transfected gene in a host, the gene can be operatively linked to transcriptional and translational expression control sequences that are functional in the chosen expression host.

[0326] Recombinant expression vectors may be used to amplify and express DNA encoding the disease specific antigenic peptides. Recombinant expression vectors are replicable DNA constructs which have synthetic or cDNA-derived DNA fragments encoding a disease specific antigenic peptide or a bioequivalent analog operatively linked to suitable transcriptional or translational regulatory elements derived from mammalian, microbial, viral or insect genes. A transcriptional unit generally comprises an assembly of (1) a genetic element or elements having a regulatory role in gene expression, for example, transcriptional promoters or enhancers, (2) a structural or coding sequence which is transcribed into mRNA and translated into protein, and (3) appropriate transcription and translation initiation and termination sequences, as described in detail herein. Such regulatory elements can include an operator sequence to control transcription. The ability to replicate in a host, usually conferred by an origin of replication, and a selection gene to facilitate recognition of transformants can additionally be incorporated. DNA regions are operatively linked when they are functionally related to each other. For example, DNA for a signal peptide (secretory leader) is operatively linked to DNA for a polypeptide if it is expressed as a precursor which participates in the secretion of the polypeptide; a promoter is operatively linked to a coding sequence if it controls the transcription of the sequence; or a ribosome binding site is operatively linked to a coding sequence if it is positioned so as to permit translation. Generally, operatively linked means contiguous, and in the case of secretory leaders, means contiguous and in reading frame. Structural elements intended for use in yeast expression systems include a leader sequence enabling extracellular secretion of translated protein by a host cell. Alternatively, where recombinant protein is expressed without a leader or transport sequence, it can include an N-terminal methionine residue. This residue can optionally be subsequently cleaved from the expressed recombinant protein to provide a final product.

[0327] Useful expression vectors for eukaryotic hosts, especially mammals or humans include, for example, vectors comprising expression control sequences from SV40, bovine papilloma virus, adenovirus and cytomegalovirus. Useful expression vectors for bacterial hosts include known bacterial plasmids, such as plasmids from Escherichia coli, including pCR 1, pBR322, pMB9 and their derivatives, wider host range plasmids, such as M 13 and filamentous single-stranded DNA phages.

[0328] Suitable host cells for expression of a polypeptide include prokaryotes, yeast, insect or higher eukaryotic cells under the control of appropriate promoters. Prokaryotes include gram negative or gram positive organisms, for example E. coli or bacilli. Higher eukaryotic cells include established cell lines of mammalian origin. Cell-free translation systems could also be employed. Appropriate cloning and expression vectors for use with bacterial, fungal, yeast, and mammalian cellular hosts are well known in the art (see Pouwels et al., Cloning Vectors: A Laboratory Manual, Elsevier, N.Y., 1985).

[0329] Various mammalian or insect cell culture systems are also advantageously employed to express recombinant protein. Expression of recombinant proteins in mammalian cells can be performed because such proteins are generally correctly folded, appropriately modified and completely functional. Examples of suitable mammalian host cell lines include the COS-7 lines of monkey kidney cells, described by Gluzman (Cell 23:175, 1981), and other cell lines capable of expressing an appropriate vector including, for example, L cells, C127, 3T3, Chinese hamster ovary (CHO), 293, HeLa and BHK cell lines. Mammalian expression vectors can comprise nontranscribed elements such as an origin of replication, a suitable promoter and enhancer linked to the gene to be expressed, and other 5′ or 3′ flanking nontranscribed sequences, and 5′ or 3′ nontranslated sequences, such as necessary ribosome binding sites, a polyadenylation site, splice donor and acceptor sites, and transcriptional termination sequences. Baculovirus systems for production of heterologous proteins in insect cells are reviewed by Luckow and Summers, Bio/Technology 6:47 (1988).

[0330] The proteins produced by a transformed host can be purified according to any suitable method. Such standard methods include chromatography (e.g., ion exchange, affinity and sizing column chromatography, and the like), centrifugation, differential solubility, or by any other standard technique for protein purification. Affinity tags such as hexahistidine (SEQ ID NO: 1834), maltose binding domain, influenza coat sequence, glutathione-S-transferase, and the like can be attached to the protein to allow easy purification by passage over an appropriate affinity column. Isolated proteins can also be physically characterized using such techniques as proteolysis, nuclear magnetic resonance and x-ray crystallography. For example, supernatants from systems which secrete recombinant protein into culture media can be first concentrated using a commercially available protein concentration filter, for example, an Amicon or Millipore Pellicon ultrafiltration unit. Following the concentration step, the concentrate can be applied to a suitable purification matrix. Alternatively, an anion exchange resin can be employed, for example, a matrix or substrate having pendant diethylaminoethyl (DEAE) groups. The matrices can be acrylamide, agarose, dextran, cellulose or other types commonly employed in protein purification. Alternatively, a cation exchange step can be employed. Suitable cation exchangers include various insoluble matrices comprising sulfopropyl or carboxymethyl groups. Finally, one or more reversed-phase high performance liquid chromatography (RP-HPLC) steps employing hydrophobic RP-HPLC media, e.g., silica gel having pendant methyl or other aliphatic groups, can be employed to further purify a cancer stem cell protein-Fc composition. Some or all of the foregoing purification steps, in various combinations, can also be employed to provide a homogeneous recombinant protein.

[0331] Recombinant protein produced in bacterial culture can be isolated, for example, by initial extraction from cell pellets, followed by one or more concentration, salting-out, aqueous ion exchange or size exclusion chromatography steps. High performance liquid chromatography (HPLC) can be employed for final purification steps. Microbial cells employed in expression of a recombinant protein can be disrupted by any convenient method, including freeze-thaw cycling, sonication, mechanical disruption, or use of cell lysing agents.

[0332] The present invention also contemplates the use of nucleic acid molecules as vehicles for delivering antigenic peptides/polypeptides to the subject in need thereof, in vivo, in the form of, e.g., DNA/RNA vaccines (see, e.g., WO2012/159643, and WO2012/159754, hereby incorporated by reference in their entirety).

[0333] In some embodiments antigens may be administered to a patient in need thereof by use of a plasmid. These are plasmids which usually consist of a strong viral promoter to drive the in vivo transcription and translation of the gene (or complementary DNA) of interest (Mor, et al., (1995). The Journal of Immunology 155 (4): 2039-2046). Intron A may sometimes be included to improve mRNA stability and hence increase protein expression (Leitner et al. (1997).The Journal of Immunology 159 (12): 6112-6119). Plasmids also include a strong polyadenylation/transcriptional termination signal, such as bovine growth hormone or rabbit beta-globulin polyadenylation sequences (Alarcon et al., (1999). Adv. Parasitol. Advances in Parasitology 42: 343-410; Robinson et al., (2000). Adv. Virus Res. Advances in Virus Research 55: 1-74; Bdhmet al., (1996). Journal of Immunological Methods 193 (1): 29-40). Multicistronic vectors are sometimes constructed to express more than one immunogen, or to express an immunogen and an immunostimulatory protein (Lewis et al., (1999). Advances in Virus Research (Academic Press) 54: 129-88)

[0334] Plasmids may be introduced into animal tissues by a number of different methods. The two most popular approaches are injection of DNA in saline, using a standard hypodermic needle, and gene gun delivery. A schematic outline of the construction of a DNA vaccine plasmid and its subsequent delivery by these two methods into a host is illustrated at Scientific American (Weiner et al., (1999) Scientific American 281 (1): 34-41). Injection in saline is normally conducted intramuscularly (IM) in skeletal muscle, or intradermally (1D), with DNA being delivered to the extracellular spaces. This can be assisted by electroporation by temporarily damaging muscle fibres with myotoxins such as bupivacaine; or by using hypertonic solutions of saline or sucrose (Alarcon et al., (1999). Adv. Parasitol. Advances in Parasitology 42: 343-410). Immune responses to this method of delivery can be affected by many factors, including needle type, needle alignment, speed of injection, volume of injection, muscle type, and age, sex and physiological condition of the animal being injected (Alarcon et al., (1999). Adv. Parasitol. Advances in Parasitology 42: 343-410).

[0335] Gene gun delivery, the other commonly used method of delivery, ballistically accelerates plasmid DNA (pDNA) that has been adsorbed onto gold or tungsten microparticles into the target cells, using compressed helium as an accelerant (Alarcon et al., (1999). Adv. Parasitol. Advances in Parasitology 42: 343-410; Lewis et al., (1999). Advances in Virus Research (Academic Press) 54: 129-88).

[0336] Alternative delivery methods may include aerosol instillation of naked DNA on mucosal surfaces, such as the nasal and lung mucosa, (Lewis et al., (1999). Advances in Virus Research (Academic Press) 54: 129-88) and topical administration of pDNA to the eye and vaginal mucosa (Lewis et al., (1999) Advances in Virus Research (Academic Press) 54: 129-88). Mucosal surface delivery has also been achieved using cationic liposome-DNA preparations, biodegradable microspheres, attenuated Shigella or Listeria vectors for oral administration to the intestinal mucosa, and recombinant adenovirus vectors. DNA or RNA may also be delivered to cells following mild mechanical disruption of the cell membrane, temporarily permeabilizing the cells. Such a mild mechanical disruption of the membrane can be accomplished by gently forcing cells through a small aperture (Ex Vivo Cytosolic Delivery of Functional Macromolecules to Immune Cells, Sharei et al, PLOS ONE|DOI:10.1371/journal.pone.0118803 Apr. 13, 2015).

[0337] In some embodiments, a disease specific vaccine or immunogenic composition may include separate DNA plasmids encoding, for example, one or more antigenic peptides/polypeptides. As discussed herein, the exact choice of expression vectors can depend upon the peptide/polypeptides to be expressed, and is well within the skill of the ordinary artisan. The expected persistence of the DNA constructs (e.g., in an episomal, non-replicating, non-integrated form in the muscle cells) is expected to provide an increased duration of protection.

[0338] One or more antigenic peptides of the invention may be encoded and expressed in vivo using a viral based system (e.g., an adenovirus system, an adeno associated virus (AAV) vector, a poxvirus, or a lentivirus). In some embodiments, the disease vaccine or immunogenic composition may include a viral based vector for use in a human patient in need thereof, such as, for example, an adenovirus. Plasmids that can be used for adeno associated virus, adenovirus, and lentivirus delivery have been described previously (see e.g., U.S. Pat. Nos. 6,955,808 and 6,943,019, and U.S. Patent application No. 20080254008, hereby incorporated by reference).

[0339] The peptides and polypeptides of the invention can also be expressed by a vector, e.g., a nucleic acid molecule as herein-discussed, e.g., RNA or a DNA plasmid, a viral vector such as a poxvirus, e.g., orthopox virus, avipox virus, or adenovirus, AAV or lentivirus. This approach involves the use of a vector to express nucleotide sequences that encode the peptide of the invention. Upon introduction into an acutely or chronically infected host or into a noninfected host, the vector expresses the immunogenic peptide, and thereby elicits a host CTL response.

[0340] Among vectors that may be used in the practice of the invention, integration in the host genome of a cell is possible with retrovirus gene transfer methods, often resulting in long term expression of the inserted transgene. In some embodiments, the retrovirus is a lentivirus. Additionally, high transduction efficiencies have been observed in many different cell types and target tissues. The tropism of a retrovirus can be altered by incorporating foreign envelope proteins, expanding the potential target population of target cells. A retrovirus can also be engineered to allow for conditional expression of the inserted transgene, such that only certain cell types are infected by the lentivirus. Cell type specific promoters can be used to target expression in specific cell types. Lentiviral vectors are retroviral vectors (and hence both lentiviral and retroviral vectors may be used in the practice of the invention). Moreover, lentiviral vectors are able to transduce or infect non-dividing cells and typically produce high viral titers. Selection of a retroviral gene transfer system may therefore depend on the target tissue. Retroviral vectors are comprised of cis-acting long terminal repeats with packaging capacity for up to 6-10 kb of foreign sequence. The minimum cis-acting LTRs are sufficient for replication and packaging of the vectors, which are then used to integrate the desired nucleic acid into the target cell to provide permanent expression. Widely used retroviral vectors that may be used in the practice of the invention include those based upon murine leukemia virus (MuLV), gibbon ape leukemia virus (GaLV), Simian Immuno deficiency virus (SIV), human immuno deficiency virus (HIV), and combinations thereof (see, e.g., Buchscher et al., (1992) J. Virol. 66:2731-2739; Johann et al., (1992) J. Virol. 66:1635-1640; Sommnerfelt et al., (1990) Virol. 176:58-59; Wilson et al., (1998) J. Virol. 63:2374-2378; Miller et al., (1991) J. Virol. 65:2220-2224; PCT/US94/05700).

[0341] Also useful in the practice of the invention is a minimal non-primate lentiviral vector, such as a lentiviral vector based on the equine infectious anemia virus (EIAV). The vectors may have cytomegalovirus (CMV) promoter driving expression of the target gene. Accordingly, the invention contemplates amongst vector(s) useful in the practice of the invention: viral vectors, including retroviral vectors and lentiviral vectors.

[0342] In an embodiment herein the delivery is via a lentivirus. Dosages, e.g., 10 dl of a recombinant lentivirus having a titer of 1×10⁹ transducing units (TU)/mL, can be adapted or extrapolated to use of a retroviral or lentiviral vector in the present invention. For transduction in tissues such as the brain, it is necessary to use very small volumes, so the viral preparation is concentrated by ultracentrifugation. Other methods of concentration such as ultrafiltration or binding to and elution from a matrix may be used. In other embodiments the amount of lentivirus administered may be 1×10⁵ or about 1×10⁵ plaque forming units (PFU), 5×10⁵ or about 5×10⁵ PFU, 1×10⁶ or about 1×10⁶ PFU, 5×10⁶ or about 5×10⁶ PFU, 1×10⁷ or about 1×10⁷ PFU, 5×10⁷ or about 5×10⁷ PFU, 1×10⁸ or about 1×10⁸ PFU, 5×10⁸ or about 5×10⁸ PFU, 1×10⁹ or about 1×10⁹ PFU, 5×10⁹ or about 5×10⁹ PFU, 1×10¹⁰ or about 1×10¹⁰ PFU or 5×10¹⁰ or about 5×10¹⁰ PFU as total single dosage for an average human of 75 kg or adjusted for the weight and size and species of the subject. One of skill in the art can determine suitable dosage. Suitable dosages for a virus can be determined empirically.

[0343] Also useful in the practice of the invention is an adenovirus vector. One advantage is the ability of recombinant adenoviruses to efficiently transfer and express recombinant genes in a variety of mammalian cells and tissues in vitro and in vivo, resulting in the high expression of the transferred nucleic acids. Further, the ability to productively infect quiescent cells, expands the utility of recombinant adenoviral vectors. In addition, high expression levels ensure that the products of the nucleic acids will be expressed to sufficient levels to generate an immune response (see e.g., U.S. Pat. No. 7,029,848, hereby incorporated by reference). As to adenovirus vectors useful in the practice of the invention, mention is made of U.S. Pat. No. 6,955,808. The adenovirus vector used can be selected from the group consisting of the Ad5, Ad35, Ad 11, C6, and C7 vectors. The sequence of the Adenovirus 5 (“Ad5”) genome has been published. (Chroboczek, J., Bieber, F., and Jacrot, B. (1992) The Sequence of the Genome of Adenovirus Type 5 and Its Comparison with the Genome of Adenovirus Type 2, Virology 186, 280-285; the contents if which is hereby incorporated by reference). Ad35 vectors are described in U.S. Pat. Nos. 6,974,695, 6,913,922, and 6,869,794. Ad11 vectors are described in U.S. Pat. No. 6,913,922. C6 adenovirus vectors are described in U.S. Pat. Nos. 6,780,407; 6,537,594; 6,309,647; 6,265,189; 6,156,567; 6,090,393; 5,942,235 and 5,833,975. C7 vectors are described in U.S. Pat. No. 6,277,558. Adenovirus vectors that are E1-defective or deleted, E3-defective or deleted, and/or E4-defective or deleted may also be used. Certain adenoviruses having mutations in the E1 region have improved safety margin because E1-defective adenovirus mutants are replication-defective in non-permissive cells, or, at the very least, are highly attenuated. Adenoviruses having mutations in the E3 region may have enhanced the immunogenicity by disrupting the mechanism whereby adenovirus down-regulates MHC class I molecules. Adenoviruses having E4 mutations may have reduced immunogenicity of the adenovirus vector because of suppression of late gene expression. Such vectors may be particularly useful when repeated re-vaccination utilizing the same vector is desired. Adenovirus vectors that are deleted or mutated in E1, E3, E4, E1 and E3, and E1 and E4 can be used in accordance with the present invention. Furthermore, “gutless” adenovirus vectors, in which all viral genes are deleted, can also be used in accordance with the present invention. Such vectors require a helper virus for their replication and require a special human 293 cell line expressing both E1a and Cre, a condition that does not exist in natural environment. Such “gutless” vectors are non-immunogenic and thus the vectors may be inoculated multiple times for re-vaccination. The “gutless” adenovirus vectors can be used for insertion of heterologous inserts/genes such as the transgenes of the present invention, and can even be used for co-delivery of a large number of heterologous inserts/genes. In some embodiments, the delivery is via an adenovirus, which may be at a single booster dose. In some embodiments, the adenovirus is delivered via multiple doses. In terms of in vivo delivery, AAV is advantageous over other viral vectors due to low toxicity and low probability of causing insertional mutagenesis because it doesn't integrate into the host genome. AAV has a packaging limit of 4.5 or 4.75 Kb. Constructs larger than 4.5 or 4.75 Kb result in significantly reduced virus production. There are many promoters that can be used to drive nucleic acid molecule expression. AAV ITR can serve as a promoter and is advantageous for eliminating the need for an additional promoter element. For ubiquitous expression, the following promoters can be used: CMV, CAG, CBh, PGK, SV40, Ferritin heavy or light chains, etc. For brain expression, the following promoters can be used: SynapsinI for all neurons, CaMKIIalpha for excitatory neurons, GAD67 or GAD65 or VGAT for GABAergic neurons, etc. Promoters used to drive RNA synthesis can include: Pol III promoters such as U6 or H1. The use of a Pol II promoter and intronic cassettes can be used to express guide RNA (gRNA). With regard to AAV vectors useful in the practice of the invention, mention is made of U.S. Pat. Nos. 5,658,785, 7,115,391, 7,172,893, 6,953,690, 6,936,466, 6,924,128, 6,893,865, 6,793,926, 6,537,540, 6,475,769 and 6,258,595, and documents cited therein. As to AAV, the AAV can be AAV1, AAV2, AAV5 or any combination thereof. One can select the AAV with regard to the cells to be targeted; e.g., one can select AAV serotypes 1, 2, 5 or a hybrid capsid AAV1, AAV2, AAV5 or any combination thereof for targeting brain or neuronal cells; and one can select AAV4 for targeting cardiac tissue. AAV8 is useful for delivery to the liver. In some embodiments the delivery is via an AAV. The dosage may be adjusted to balance the therapeutic benefit against any side effects.

[0344] In some embodiments, effectively activating a cellular immune response for a disease vaccine or immunogenic composition can be achieved by expressing the relevant antigens in a vaccine or immunogenic composition in a non-pathogenic microorganism. Well-known examples of such microorganisms are Mycobacterium bovis BCG, Salmonella and Pseudomona (See, U.S. Pat. No. 6,991,797, hereby incorporated by reference in its entirety).

[0345] In some embodiments, a Poxvirus is used in the disease vaccine or immunogenic composition. These include orthopoxvirus, avipox, vaccinia, MVA, NYVAC, canarypox, ALVAC, fowlpox, TROVAC, etc. (see e.g., Verardiet al., Hum Vaccin Immunother. 2012 July; 8(7):961-70; and Moss, Vaccine. 2013; 31(39): 4220-4222). Poxvirus expression vectors were described in 1982 and quickly became widely used for vaccine development as well as research in numerous fields. Advantages of the vectors include simple construction, ability to accommodate large amounts of foreign DNA and high expression levels. Information concerning poxviruses that may be used in the practice of the invention, such as Chordopoxvirinae subfamily poxviruses (poxviruses of vertebrates), for instance, orthopoxviruses and avipoxviruses, e.g., vaccinia virus (e.g., Wyeth Strain, WR Strain (e.g., ATCC® VR-1354), Copenhagen Strain, NYVAC, NYVAC.1, NYVAC.2, MVA, MVA-BN), canarypox virus (e.g., Wheatley C93 Strain, ALVAC), fowlpox virus (e.g., FP9 Strain, Webster Strain, TROVAC), dovepox, pigeonpox, quailpox, and raccoon pox, inter alia, synthetic or non-naturally occurring recombinants thereof, uses thereof, and methods for making and using such recombinants may be found in scientific and patent literature.

[0346] In some embodiments, the vaccinia virus is used in the disease vaccine or immunogenic composition to express a antigen. (Rolph et al., Recombinant viruses as vaccines and immunological tools. Curr Opin Immunol 9:517-524, 1997). The recombinant vaccinia virus is able to replicate within the cytoplasm of the infected host cell and the polypeptide of interest can therefore induce an immune response. Moreover, Poxviruses have been widely used as vaccine or immunogenic composition vectors because of their ability to target encoded antigens for processing by the major histocompatibility complex class I pathway by directly infecting immune cells, in particular antigen-presenting cells, but also due to their ability to self-adjuvant.

[0347] In some embodiments, ALVAC is used as a vector in a disease vaccine or immunogenic composition. ALVAC is a canarypox virus that can be modified to express foreign transgenes and has been used as a method for vaccination against both prokaryotic and eukaryotic antigens (Horig H, Lee D S, Conkright W, et al. Phase I clinical trial of a recombinant canarypoxvirus (ALVAC) vaccine expressing human carcinoembryonic antigen and the B7.1 co-stimulatory molecule. Cancer Immunol Immunother 2000; 49:504-14; von Mehren M, Arlen P, Tsang K Y, et al. Pilot study of a dual gene recombinant avipox vaccine containing both carcinoembryonic antigen (CEA) and B7.1 transgenes in patients with recurrent CEA-expressing adenocarcinomas. Clin Cancer Res 2000; 6:2219-28; Musey L, Ding Y, Elizaga M, et al. HIV-1 vaccination administered intramuscularly can induce both systemic and mucosal T cell immunity in HIV-1-uninfected individuals. J Immunol 2003; 171:1094-101; Paoletti E. Applications of pox virus vectors to vaccination: an update. Proc Natl Acad Sci USA 1996; 93:11349-53; U.S. Pat. No. 7,255,862). In a phase I clinical trial, an ALVAC virus expressing the tumor antigen CEA showed an excellent safety profile and resulted in increased CEA-specific T cell responses in selected patients; objective clinical responses, however, were not observed (Marshall J L, Hawkins M J, Tsang K Y, et al. Phase I study in cancer patients of a replication-defective avipox recombinant vaccine that expresses human carcinoembryonic antigen. J Clin Oncol 1999; 17:332-7).

[0348] In some embodiments, a Modified Vaccinia Ankara (MVA) virus may be used as a viral vector for an antigen vaccine or immunogenic composition. MVA is a member of the Orthopoxvirus family and has been generated by about 570 serial passages on chicken embryo fibroblasts of the Ankara strain of Vaccinia virus (CVA) (for review see Mayr, A., et al., Infection 3, 6-14, 1975). As a consequence of these passages, the resulting MVA virus contains 31 kilobases less genomic information compared to CVA, and is highly hosT cell restricted (Meyer, H. et al., J. Gen. Virol. 72, 1031-1038, 1991). MVA is characterized by its extreme attenuation, namely, by a diminished virulence or infectious ability, but still holds an excellent immunogenicity. When tested in a variety of animal models, MVA was proven to be avirulent, even in immuno-suppressed individuals. Moreover, MVA-BN®-HER2 is a candidate immunotherapy designed for the treatment of HER-2-positive breast cancer and is currently in clinical trials. (Mandl et al., Cancer Immunol Immunother. January 2012; 61(1): 19-29). Methods to make and use recombinant MVA has been described (e.g., see U.S. Pat. Nos. 8,309,098 and 5,185,146 hereby incorporated in its entirety).

[0349] In some embodiments, recombinant viral particles of the vaccine or immunogenic composition are administered to patients in need thereof.

### Neoantigen Binding Peptides

[0350] In certain embodiments, the present invention provides a binding protein (e.g., an antibody or antigen-binding fragment thereof), or a T cell receptor (TCR), or a chimeric antigen receptor (CAR) capable of binding with a high affinity to a neoantigen peptide:human leukocyte antigen (HLA) complex. In some embodiments, the present invention provides a CAR that is capable of binding with a high affinity to a neoantigenic peptide derived from the extracellular domain of a protein. In certain embodiments, a neoantigen-specific binding protein or TCR or CAR as described herein includes variant polypeptide species that have one or more amino acid substitutions, insertions, or deletions in the native amino acid sequence, provided that the binding protein retains or substantially retains its specific binding function. Conservative substitutions of amino acids are well known and may occur naturally or may be introduced when the binding protein or TCR is recombinantly produced. Amino acid substitutions, deletions, and additions may be introduced into a protein using mutagenesis methods known in the art (see, e.g., Sambrook et al., Molecular Cloning: A Laboratory Manual, 3d ed., Cold Spring Harbor Laboratory Press, N Y, 2001). Oligonucleotide-directed site-specific (or segment specific) mutagenesis procedures may be employed to provide an altered polynucleotide that has particular codons altered according to the substitution, deletion, or insertion desired. Alternatively, random or saturation mutagenesis techniques, such as alanine scanning mutagenesis, error prone polymerase chain reaction mutagenesis, and oligonucleotide-directed mutagenesis may be used to prepare immunogen polypeptide variants (see, e.g., Sambrook et al., supra).

[0351] A variety of criteria known to persons skilled in the art indicate whether an amino acid that is substituted at a particular position in a peptide or polypeptide is conservative (or similar). For example, a similar amino acid or a conservative amino acid substitution is one in which an amino acid residue is replaced with an amino acid residue having a similar side chain. Similar amino acids may be included in the following categories: amino acids with basic side chains (e.g., lysine, arginine, histidine); amino acids with acidic side chains (e.g., aspartic acid, glutamic acid); amino acids with uncharged polar side chains (e.g., glycine, asparagine, glutamine, serine, threonine, tyrosine, cysteine, histidine); amino acids with nonpolar side chains (e.g., alanine, valine, leucine, isoleucine, proline, phenylalanine, methionine, tryptophan); amino acids with beta-branched side chains (e.g., threonine, valine, isoleucine), and amino acids with aromatic side chains (e.g., tyrosine, phenylalanine, tryptophan). Proline, which is considered more difficult to classify, shares properties with amino acids that have aliphatic side chains (e.g., leucine, valine, isoleucine, and alanine) In certain circumstances, substitution of glutamine for glutamic acid or asparagine for aspartic acid may be considered a similar substitution in that glutamine and asparagine are amide derivatives of glutamic acid and aspartic acid, respectively. As understood in the art “similarity” between two polypeptides is determined by comparing the amino acid sequence and conserved amino acid substitutes thereto of the polypeptide to the sequence of a second polypeptide (e.g., using GENEWORKS, Align, the BLAST algorithm, or other algorithms described herein and practiced in the art).

[0352] In certain embodiments, a neoantigen specific binding protein, TCR or CAR is capable of (a) specifically binding to a neoantigen:HLA complex on a cell surface independent or in the absence of CD8. In certain embodiments, a neoantigen specific binding protein is a T cell receptor (TCR), a chimeric antigen receptor or an antigen-binding fragment of a TCR, any of which can be chimeric, humanized or human. In further embodiments, an antigen-binding fragment of the TCR comprises a single chain TCR (scTCR).

[0353] In certain embodiments, there is provided a composition comprising a neoantigen-specific binding protein or high affinity recombinant TCR according to any one of the above embodiments and a pharmaceutically acceptable carrier, diluent, or excipient.

[0354] Methods useful for isolating and purifying recombinantly produced soluble TCR, by way of example, can include obtaining supernatants from suitable host cell/vector systems that secrete the recombinant soluble TCR into culture media and then concentrating the media using a commercially available filter. Following concentration, the concentrate can be applied to a single suitable purification matrix or to a series of suitable matrices, such as an affinity matrix or an ion exchange resin. One or more reverse phase HPLC steps may be employed to further purify a recombinant polypeptide. These purification methods can also be employed when isolating an immunogen from its natural environment. Methods for large scale production of one or more of the isolated/recombinant soluble TCR described herein include batch cell culture, which is monitored and controlled to maintain appropriate culture conditions. Purification of the soluble TCR may be performed according to methods described herein and known in the art.

### III. Immunogenic and Vaccine Compositions

[0355] In some embodiments the present invention is directed to an immunogenic composition, e.g., a vaccine composition capable of raising a neoantigen-specific response (e.g., a humoral or cell-mediated immune response). In some embodiments, the immunogenic composition comprises neoantigen therapeutics (e.g., peptides, polynucleotides, TCR, CAR, cells containing TCR or CAR, dendritic cell containing polypeptide, dendritic cell containing polynucleotide, antibody, etc.) described herein corresponding to tumor specific neoantigen identified herein.

[0356] In some embodiments, immunogenic peptides are identified from one or more subjects with a disease or condition. In some embodiments, immunogenic peptides are specific to one or more subjects with a disease or condition. In some embodiments, immunogenic peptides can bind to an HLA that is matched to an HLA haplotype of one or more subjects with a disease or condition.

[0357] A person skilled in the art will be able to select neoantigenic therapeutics by testing, for example, the generation of T cells in vitro as well as their efficiency and overall presence, the proliferation, affinity and expansion of certain T cells for certain peptides, and the functionality of the T cells, e.g. by analyzing the IFN-γ production or tumor killing by T cells. The most efficient peptides can then combined as an immunogenic composition.

[0358] In some embodiments of the present invention the different neoantigenic peptides and/or polypeptides are selected so that one immunogenic composition comprises neoantigenic peptides and/or polypeptides capable of associating with different MHC molecules, such as different MHC class I molecule. In some embodiments, an immunogenic composition comprises neoantigenic peptides and/or polypeptides capable of associating with the most frequently occurring MHC class I molecules. Hence immunogenic compositions described herein comprise different peptides capable of associating with at least 2, at least 3, or at least 4 MHC class I or class II molecules.

[0359] In some embodiments, an immunogenic composition described herein is capable of raising a specific cytotoxic T cells response, specific helper T cell response, or a B cell response.

[0360] In some embodiments, an immunogenic composition described herein can further comprise an adjuvant and/or a carrier. Examples of useful adjuvants and carriers are given herein below. Polypeptides and/or polynucleotides in the composition can be associated with a carrier such as e.g. a protein or an antigen-presenting cell such as e.g. a dendritic cell (DC) capable of presenting the peptide to a T cell or a B cell. In further embodiments, DC-binding peptides are used as carriers to target the neoantigenic peptides and polynucleotides encoding the neoantigen peptides to dendritic cells (Sioud et al. FASEB J 27: 3272-3283 (2013)).

[0361] In embodiments, the neoantigenic polypeptides or polynucleotides can be provided as antigen presenting cells (e.g., dendritic cells) containing such polypeptides or polynucleotides. In other embodiments, such antigen presenting cells are used to stimulate T cells for use in patients.

[0362] In some embodiments, the antigen presenting cells are dendritic cells. In related embodiments, the dendritic cells are autologous dendritic cells that are pulsed with the neoantigenic peptide or nucleic acid. The neoantigenic peptide can be any suitable peptide that gives rise to an appropriate T cell response. T cell therapy using autologous dendritic cells pulsed with peptides from a tumor associated antigen is disclosed in Murphy et al. (1996) The Prostate 29, 371-380 and Tjua et al. (1997) The Prostate 32, 272-278. In some embodiments, the T cell is a CTL. In some embodiments, the T cell is a HTL.

[0363] Thus, one embodiment of the present invention an immunogenic composition containing at least one antigen presenting cell (e.g., a dendritic cell) that is pulsed or loaded with one or more neoantigenic polypeptides or polynucleotides described herein. In embodiments, such APCs are autologous (e.g., autologous dendritic cells). Alternatively, peripheral blood mononuclear cells (PBMCs) isolated from a patient can be loaded with neoantigenic peptides or polynucleotides ex vivo. In related embodiments, such APCs or PBMCs are injected back into the patient.

[0364] The polynucleotide can be any suitable polynucleotide that is capable of transducing the dendritic cell, thus resulting in the presentation of a neoantigenic peptide and induction of immunity. In some embodiments, the polynucleotide can be naked DNA that is taken up by the cells by passive loading. In another embodiment, the polynucleotide is part of a delivery vehicle, for example, a liposome, virus like particle, plasmid, or expression vector. In another embodiment, the polynucleotide is delivered by a vector-free delivery system, for example, high performance electroporation and high-speed cell deformation). In embodiments, such antigen presenting cells (APCs) (e.g., dendritic cells) or peripheral blood mononuclear cells (PBMCs) are used to stimulate a T cell (e.g., an autologous T cell). In related embodiments, the T cell is a CTL. In other related embodiments, the T cell is an HTL. Such T cells are then injected into the patient. In some embodiments, CTL is injected into the patient. In some embodiments, HTL is injected into the patient. In some embodiments, both CTL and HTL are injected into the patient. Administration of either therapeutic can be performed simultaneously or sequentially and in any order.

[0365] The pharmaceutical compositions (e.g., immunogenic compositions) described herein for therapeutic treatment are intended for parenteral, topical, nasal, oral or local administration. In some embodiments, the pharmaceutical compositions described herein are administered parenterally, e.g., intravenously, subcutaneously, intradermally, or intramuscularly. In embodiments, the composition can be administered intratumorally. The compositions can be administered at the site of surgical excision to induce a local immune response to the tumor. In some embodiments, described herein are compositions for parenteral administration which comprise a solution of the neoantigenic peptides and immunogenic compositions are dissolved or suspended in an acceptable carrier, for example, an aqueous carrier. A variety of aqueous carriers can be used, e.g., water, buffered water, 0.9% saline, 0.3% glycine, hyaluronic acid and the like. These compositions can be sterilized by conventional, well known sterilization techniques, or can be sterile filtered. The resulting aqueous solutions can be packaged for use as is, or lyophilized, the lyophilized preparation being combined with a sterile solution prior to administration. The compositions can contain pharmaceutically acceptable auxiliary substances as required to approximate physiological conditions, such as pH adjusting and buffering agents, tonicity adjusting agents, wetting agents and the like, for example, sodium acetate, sodium lactate, sodium chloride, potassium chloride, calcium chloride, sorbitan monolaurate, triethanolamine oleate, etc.

[0366] The concentration of neoantigenic peptides and polynucleotides described herein in the pharmaceutical formulations can vary widely, i.e., from less than about 0.1%, usually at or at least about 2% to as much as 20% to 50% or more by weight, and will be selected by fluid volumes, viscosities, etc., according to the particular mode of administration selected.

[0367] The neoantigenic peptides and polynucleotides described herein can also be administered via liposomes, which target the peptides to a particular cells tissue, such as lymphoid tissue. Liposomes are also useful in increasing the half-life of the peptides. Liposomes include emulsions, foams, micelles, insoluble monolayers, liquid crystals, phospholipid dispersions, lamellar layers and the like. In these preparations the peptide to be delivered is incorporated as part of a liposome, alone or in conjunction with a molecule which binds to, e.g., a receptor prevalent among lymphoid cells, such as monoclonal antibodies which bind to the DEC205 antigen, or with other therapeutic or immunogenic compositions. Thus, liposomes filled with a desired peptide or polynucleotide described herein can be directed to the site of lymphoid cells, where the liposomes then deliver the selected therapeutic/immunogenic polypeptide/polynucleotide compositions. Liposomes can be formed from standard vesicle-forming lipids, which generally include neutral and negatively charged phospholipids and a sterol, for example, cholesterol. The selection of lipids is generally guided by consideration of, e.g., liposome size, acid lability and stability of the liposomes in the blood stream. A variety of methods are available for preparing liposomes, as described in, e.g., Szoka et al., Ann. Rev. Biophys. Bioeng. 9; 467 (1980), U.S. Pat. Nos. 4,235,871, 4,501,728, 4,501,728, 4,837,028, and 5,019,369.

[0368] For targeting to the immune cells, a neoantigen polypeptides or polynucleotides to be incorporated into the liposome for cell surface determinants of the desired immune system cells. A liposome suspension containing a peptide can be administered intravenously, locally, topically, etc. in a dose which varies according to, inter alia, the manner of administration, the polypeptide or polynucleotide being delivered, and the stage of the disease being treated.

[0369] In some embodiments, neoantigen polypeptides and polynucleotides are targeted to dendritic cells. In some embodiments, the neoantigen polypeptides and polynucleotides are target to dendritic cells using the markers DEC205, XCR1, CD197, CD80, CD86, CD123, CD209, CD273, CD283, CD289, CD184, CD85h, CD85j, CD85k, CD85d, CD85g, CD85a, TSLP receptor, Clec9a or CD1a.

[0370] For solid compositions, conventional or nanoparticle nontoxic solid carriers can be used which include, for example, pharmaceutical grades of mannitol, lactose, starch, magnesium stearate, sodium saccharin, talcum, cellulose, glucose, sucrose, magnesium carbonate, and the like. For oral administration, a pharmaceutically acceptable nontoxic composition is formed by incorporating any of the normally employed excipients, such as those carriers previously listed, and generally 10-95% of active ingredient, that is, one or more neoantigenic polypeptides or polynucleotides described herein at a concentration of 25%-75%.

[0371] For aerosol administration, the neoantigenic polypeptides or polynucleotides can be supplied in finely divided form along with a surfactant and propellant. Representative of such agents are the esters or partial esters of fatty acids containing from 6 to 22 carbon atoms, such as caproic, octanoic, lauric, palmitic, stearic, linoleic, linolenic, olesteric and oleic acids with an aliphatic polyhydric alcohol or its cyclic anhydride. Mixed esters, such as mixed or natural glycerides can be employed. The surfactant can constitute 0.1%-20% by weight of the composition, or 0.25-5%. The balance of the composition can be propellant. A carrier can also be included as desired, as with, e.g., lecithin for intranasal delivery.

[0372] Additional methods for delivering the neoantigenic polynucleotides described herein are also known in the art. For instance, the nucleic acid can be delivered directly, as “naked DNA”. This approach is described, for instance, in Wolff et al., Science 247: 1465-1468 (1990) as well as U.S. Pat. Nos. 5,580,859 and 5,589,466. The nucleic acids can also be administered using ballistic delivery as described, for instance, in U.S. Pat. No. 5,204,253. Particles comprised solely of DNA can be administered. Alternatively, DNA can be adhered to particles, such as gold particles.

[0373] For therapeutic or immunization purposes, mRNA encoding the neoantigenic peptides, or peptide binding agents can also be administered to the patient. In some embodiments, the mRNA is self-amplifying RNA. In a further embodiment, the self-amplifying RNA is a part of a synthetic lipid nanoparticle formulation (Geall et al., Proc Natl Acad Sci USA. 109: 14604-14609 (2012)).

[0374] The nucleic acids can also be delivered complexed to cationic compounds, such as cationic lipids. Lipid-mediated gene delivery methods are described, for instance, in WO 96/18372, WO 93/24640; Mannino & Gould-Fogerite, BioTechniques 6(7): 682-691 (1988); U.S. Pat. No. 5,279,833; WO 91/06309; and Felgner et al., Proc. Natl. Acad. Sci. USA 84: 7413-7414 (1987).

[0375] The neoantigenic peptides and polypeptides described herein can also be expressed by attenuated viruses, such as vaccinia or fowlpox. This approach involves the use of vaccinia virus as a vector to express nucleotide sequences that encode the peptide described herein. Upon introduction into an acutely or chronically infected host or into a noninfected host, the recombinant vaccinia virus expresses the immunogenic peptide, and thereby elicits a host CTL response. Vaccinia vectors and methods useful in immunization protocols are described in, e.g., U.S. Pat. No. 4,722,848. Another vector is BCG (Bacille Calmette Guerin). BCG vectors are described in Stover et al. (Nature 351:456-460 (1991)). A wide variety of other vectors useful for therapeutic administration or immunization of the peptides described herein will be apparent to those skilled in the art from the description herein.

[0376] Adjuvants are any substance whose admixture into the immunogenic composition increases or otherwise modifies the immune response to the therapeutic agent. Carriers are scaffold structures, for example a polypeptide or a polysaccharide, to which a neoantigenic polypeptide or polynucleotide, is capable of being associated. Optionally, adjuvants are conjugated covalently or non-covalently to the polypeptides or polynucleotides described herein.

[0377] The ability of an adjuvant to increase the immune response to an antigen is typically manifested by a significant increase in immune-mediated reaction, or reduction in disease symptoms. For example, an increase in humoral immunity can be manifested by a significant increase in the titer of antibodies raised to the antigen, and an increase in T cell activity can be manifested in increased cell proliferation, or cellular cytotoxicity, or cytokine secretion. An adjuvant can also alter an immune response, for example, by changing a primarily humoral or T helper 2 response into a primarily cellular, or T helper 1 response.

[0378] Suitable adjuvants are known in the art (see, WO 2015/095811) and include, but are not limited to poly(I:C), poly-ICLC, STING agonist, 1018 ISS, aluminium salts, Amplivax, AS15, BCG, CP-870,893, CpG7909, CyaA, dSLIM, GM-CSF, IC30, IC31, Imiquimod, ImuFact IMP321, IS Patch, ISS, ISCOMATRIX, Juvlmmune, LipoVac, MF59, monophosphoryl lipid A, Montanide IMS 1312, Montanide ISA 206, Montanide ISA 50V, Montanide ISA-51, OK-432, OM-174, OM-197-MP-EC, ONTAK, PepTel®. vector system, PLG microparticles, resiquimod, SRL172, virosomes and other virus-like particles, YF-17D, VEGF trap, R848, beta-glucan, Pam3Cys, Pam3CSK4, Aquila's QS21 stimulon (Aquila Biotech, Worcester, Mass., USA) which is derived from saponin, mycobacterial extracts and synthetic bacterial cell wall mimics, and other proprietary adjuvants such as Ribi's Detox. Quil or Superfos. Adjuvants also include incomplete Freund's or GM-CSF. Several immunological adjuvants (e.g., MF59) specific for dendritic cells and their preparation have been described previously (Dupuis M, et al., Cell Immunol. 1998; 186(1):18-27; Allison A C; Dev Biol Stand. 1998; 92:3-11) (Mosca et al. Frontiers in Bioscience, 2007; 12:4050-4060) (Gamvrellis et al. Immunol & Cell Biol. 2004; 82: 506-516). Also cytokines can be used. Several cytokines have been directly linked to influencing dendritic cell migration to lymphoid tissues (e.g., TNF-alpha), accelerating the maturation of dendritic cells into efficient antigen-presenting cells for T-lymphocytes (e.g., GM-CSF, PGE1, PGE2, IL-1, IL-1b, IL-4, IL-6 and CD40L) (U.S. Pat. No. 5,849,589 incorporated herein by reference in its entirety) and acting as immunoadjuvants (e.g., IL-12) (Gabrilovich D I, et al., J Immunother Emphasis Tumor Immunol. 1996 (6):414-418).

[0379] CpG immunostimulatory oligonucleotides have also been reported to enhance the effects of adjuvants in a vaccine setting. Without being bound by theory, CpG oligonucleotides act by activating the innate (non-adaptive) immune system via Toll-like receptors (TLR), mainly TLR9. CpG triggered TLR9 activation enhances antigen-specific humoral and cellular responses to a wide variety of antigens, including peptide or protein antigens, live or killed viruses, dendritic cell immunogenic pharmaceutical compositions, autologous cellular immunogenic pharmaceutical compositions and polysaccharide conjugates in both prophylactic and therapeutic immunogenic pharmaceutical compositions. Importantly, it enhances dendritic cell maturation and differentiation, resulting in enhanced activation of TH1 cells and strong cytotoxic T-lymphocyte (CTL) generation, even in the absence of CD4 T cell help. The TH1 bias induced by TLR9 stimulation is maintained even in the presence of adjuvants such as alum or incomplete Freund's adjuvant (IFA) that normally promote a TH2 bias. CpG oligonucleotides show even greater adjuvant activity when formulated or co-administered with other adjuvants or in formulations such as microparticles, nano particles, lipid emulsions or similar formulations, which are especially necessary for inducing a strong response when the antigen is relatively weak. They also accelerate the immune response and enabled the antigen doses to be reduced with comparable antibody responses to the full-dose immunogenic pharmaceutical composition without CpG in some experiments (Arthur M. Krieg, Nature Reviews, Drug Discovery, 5, Jun. 2006, 471-484). U.S. Pat. No. 6,406,705 B1 describes the combined use of CpG oligonucleotides, non-nucleic acid adjuvants and an antigen to induce an antigen-specific immune response. A commercially available CpG TLR9 antagonist is dSLIM (double Stem Loop Immunomodulator) by Mologen (Berlin, GERMANY), which is a component of the pharmaceutical composition described herein. Other TLR binding molecules such as RNA binding TLR 7, TLR 8 and/or TLR 9 can also be used.

[0380] Other examples of useful adjuvants include, but are not limited to, chemically modified CpGs (e.g. CpR, Idera), Poly(I:C) (e.g. polyi:CI2U), non-CpG bacterial DNA or RNA, ssRNA40 for TLR8, as well as immunoactive small molecules and antibodies such as cyclophosphamide, sunitinib, bevacizumab, celebrex, NCX-4016, sildenafil, tadalafil, vardenafil, sorafinib, XL-999, CP-547632, pazopanib, ZD2171, AZD2171, ipilimumab, tremelimumab, and SC58175, which can act therapeutically and/or as an adjuvant. The amounts and concentrations of adjuvants and additives useful in the context of the present invention can readily be determined by the skilled artisan without undue experimentation. Additional adjuvants include colony-stimulating factors, such as Granulocyte Macrophage Colony Stimulating Factor (GM-CSF, sargramostim).

[0381] In some embodiments, an immunogenic composition according to the present invention can comprise more than one different adjuvants. Furthermore, the invention encompasses a therapeutic composition comprising any adjuvant substance including any of the above or combinations thereof. It is also contemplated that the neoantigenic therapeutic (e.g., a humoral or cell-mediated immune response). In some embodiments, the immunogenic composition comprises neoantigen therapeutics (e.g., peptides, polynucleotides, TCR, CAR, cells containing TCR or CAR, dendritic cell containing polypeptide, dendritic cell containing polynucleotide, antibody, etc.) and the adjuvant can be administered separately in any appropriate sequence.

[0382] A carrier can be present independently of an adjuvant. The function of a carrier can for example be to increase the molecular weight of in particular mutant in order to increase their activity or immunogenicity, to confer stability, to increase the biological activity, or to increase serum half-life. Furthermore, a carrier can aid presenting peptides to T cells. The carrier can be any suitable carrier known to the person skilled in the art, for example a protein or an antigen presenting cell. A carrier protein could be but is not limited to keyhole limpet hemocyanin, serum proteins such as transferrin, bovine serum albumin, human serum albumin, thyroglobulin or ovalbumin, immunoglobulins, or hormones, such as insulin or palmitic acid. In some embodiments, the carrier comprises a human fibronection type III domain (Koide et al. Methods Enzymol. 2012; 503:135-56). For immunization of humans, the carrier must be a physiologically acceptable carrier acceptable to humans and safe. However, tetanus toxoid and/or diptheria toxoid are suitable carriers In some embodiments of the invention. Alternatively, the carrier can be dextrans for example sepharose.

[0383] In some embodiments, the polypeptides can be synthesized as multiply linked peptides as an alternative to coupling a polypeptide to a carrier to increase immunogenicity. Such molecules are also known as multiple antigenic peptides (MAPS).

[0384] Neoantigens that induce an immune response can be used as a composition when combined with an acceptable carrier or excipient. Such compositions are useful for in vitro or in vivo analysis or for administration to a subject in vivo or ex vivo for treating a subject with a disease.

[0385] Thus pharmaceutical compositions can include, in addition to active ingredient, a pharmaceutically acceptable excipient, carrier, buffer, stabilizer or other materials well known to those skilled in the art. Such materials should be non-toxic and should not interfere with the efficacy of the active ingredient. The precise nature of the carrier or other material will depend on the route of administration.

[0386] Pharmaceutical formulations comprising a protein of interest, e.g., a neoantigen described herein, can be prepared for storage by mixing the neoantigen having the desired degree of purity with optional physiologically acceptable carriers, excipients or stabilizers (Remington's Pharmaceutical Sciences 16th edition, Oslo, A. Ed. (1980)), in the form of lyophilized formulations or aqueous solutions. Acceptable carriers, excipients, or stabilizers are those that are non-toxic to recipients at the dosages and concentrations employed, and include buffers such as phosphate, citrate, and other organic acids; antioxidants including ascorbic acid and methionine; preservatives (such as octadecyldimethylbenzyl ammonium chloride; hexamethonium chloride; benzalkonium chloride, benzethonium chloride; phenol, butyl or benzyl alcohol; alkyl parabens such as methyl or propyl paraben; catechol; resorcinol; cyclohexanol; 3-pentanol; and m-cresol); low molecular weight (less than about 10 residues) polypeptides; proteins, such as serum albumin, gelatin, or immunoglobulins; hydrophilic polymers such as polyvinylpyrrolidone; amino acids such as glycine, glutamine, asparagine, histidine, arginine, or lysine; monosaccharides, disaccharides, and other carbohydrates including glucose, mannose, or dextrins; chelating agents such as EDTA; sugars such as sucrose, mannitol, trehalose or sorbitol; salt-forming counter-ions such as sodium; metal complexes (e.g., Zn-protein complexes); and/or non-ionic surfactants such as TWEEN®, PLURONICS® or polyethylene glycol (PEG).

[0387] Acceptable carriers are physiologically acceptable to the administered patient and retain the therapeutic properties of the compounds with/in which it is administered. Acceptable carriers and their formulations are generally described in, for example, Remington' pharmaceutical Sciences (18th Edition, ed. A. Gennaro, Mack Publishing Co., Easton, Pa. 1990). One exemplary carrier is physiological saline. A pharmaceutically acceptable carrier is a pharmaceutically acceptable material, composition or vehicle, such as a liquid or solid filler, diluent, excipient, solvent or encapsulating material, involved in carrying or transporting the subject compounds from the administration site of one organ, or portion of the body, to another organ, or portion of the body, or in an in vitro assay system. Acceptable carriers are compatible with the other ingredients of the formulation and not injurious to a subject to whom it is administered. Nor should an acceptable carrier alter the specific activity of the neoantigens.

[0388] In one aspect, provided herein are pharmaceutically acceptable or physiologically acceptable compositions including solvents (aqueous or non-aqueous), solutions, emulsions, dispersion media, coatings, isotonic and absorption promoting or delaying agents, compatible with pharmaceutical administration. Pharmaceutical compositions or pharmaceutical formulations therefore refer to a composition suitable for pharmaceutical use in a subject. The pharmaceutical compositions and formulations include an amount of a neoantigen (or polynucleotide encoding a neoantigen) and a pharmaceutically or physiologically acceptable carrier. Compositions can be formulated to be compatible with a particular route of administration (i.e., systemic or local). Thus, compositions include carriers, diluents, or excipients suitable for administration by various routes.

[0389] In some embodiments, a composition further comprises an acceptable additive in order to improve the stability of the neoantigen in the composition and/or to control the release rate of the composition. Acceptable additives do not alter the specific activity of the neoantigens. Exemplary acceptable additives include, but are not limited to, a sugar such as mannitol, sorbitol, glucose, xylitol, trehalose, sorbose, sucrose, galactose, dextran, dextrose, fructose, lactose and mixtures thereof. Acceptable additives can be combined with acceptable carriers and/or excipients such as dextrose. Alternatively, exemplary acceptable additives include, but are not limited to, a surfactant such as polysorbate 20 or polysorbate 80 to increase stability of the peptide and decrease gelling of the solution. The surfactant can be added to the composition in an amount of 0.01% to 5% of the solution. Addition of such acceptable additives increases the stability and half-life of the composition in storage.

[0390] The pharmaceutical composition can be administered, for example, by injection. Compositions for injection include aqueous solutions (where water soluble) or dispersions and sterile powders for the extemporaneous preparation of sterile injectable solutions or dispersion. For intravenous administration, suitable carriers include physiological saline, bacteriostatic water, or phosphate buffered saline (PBS). The carrier can be a solvent or dispersion medium containing, for example, water, ethanol, polyol (for example, glycerol, propylene glycol, and liquid polyethylene glycol, and the like), and suitable mixtures thereof. Fluidity can be maintained, for example, by the use of a coating such as lecithin, by the maintenance of the required particle size in the case of dispersion and by the use of surfactants. Antibacterial and antifungal agents include, for example, parabens, chlorobutanol, phenol, ascorbic acid and thimerosal. Isotonic agents, for example, sugars, polyalcohols such as manitol, sorbitol, and sodium chloride can be included in the composition. The resulting solutions can be packaged for use as is, or lyophilized; the lyophilized preparation can later be combined with a sterile solution prior to administration. For intravenous, injection, or injection at the site of affliction, the active ingredient will be in the form of a parenterally acceptable aqueous solution which is pyrogen-free and has suitable pH, isotonicity and stability. Those of relevant skill in the art are well able to prepare suitable solutions using, for example, isotonic vehicles such as Sodium Chloride Injection, Ringer's Injection, Lactated Ringer's Injection. Preservatives, stabilizers, buffers, antioxidants and/or other additives can be included, as needed. Sterile injectable solutions can be prepared by incorporating an active ingredient in the required amount in an appropriate solvent with one or a combination of ingredients enumerated above, as required, followed by filtered sterilization. Generally, dispersions are prepared by incorporating the active ingredient into a sterile vehicle which contains a basic dispersion medium and the required other ingredients from those enumerated above. In the case of sterile powders for the preparation of sterile injectable solutions, the preferred methods of preparation are vacuum drying and freeze drying which yields a powder of the active ingredient plus any additional desired ingredient from a previously sterile-filtered solution thereof.

[0391] Compositions can be conventionally administered intravenously, such as by injection of a unit dose, for example. For injection, an active ingredient can be in the form of a parenterally acceptable aqueous solution which is substantially pyrogen-free and has suitable pH, isotonicity and stability. One can prepare suitable solutions using, for example, isotonic vehicles such as Sodium Chloride Injection, Ringer's Injection, Lactated Ringer's Injection. Preservatives, stabilizers, buffers, antioxidants and/or other additives can be included, as required. Additionally, compositions can be administered via aerosolization.

[0392] In some embodiments, the composition is lyophilized, for example, to increase shelf-life in storage. When the compositions are considered for use in medicaments or any of the methods provided herein, it is contemplated that the composition can be substantially free of pyrogens such that the composition will not cause an inflammatory reaction or an unsafe allergic reaction when administered to a human patient. Testing compositions for pyrogens and preparing compositions substantially free of pyrogens are well understood to one or ordinary skill of the art and can be accomplished using commercially available kits.

[0393] Acceptable carriers can contain a compound that stabilizes, increases or delays absorption, or increases or delays clearance. Such compounds include, for example, carbohydrates, such as glucose, sucrose, or dextrans; low molecular weight proteins; compositions that reduce the clearance or hydrolysis of peptides; or excipients or other stabilizers and/or buffers. Agents that delay absorption include, for example, aluminum monostearate and gelatin. Detergents can also be used to stabilize or to increase or decrease the absorption of the pharmaceutical composition, including liposomal carriers. To protect from digestion the compound can be complexed with a composition to render it resistant to acidic and enzymatic hydrolysis, or the compound can be complexed in an appropriately resistant carrier such as a liposome.

[0394] The compositions can be administered in a manner compatible with the dosage formulation, and in a therapeutically effective amount. The quantity to be administered depends on the subject to be treated, capacity of the subject's immune system to utilize the active ingredient, and degree of binding capacity desired. Precise amounts of active ingredient required to be administered depend on the judgment of the practitioner and are peculiar to each individual. Suitable regimes for initial administration and booster shots are also variable, but are typified by an initial administration followed by repeated doses at one or more hour intervals by a subsequent injection or other administration. Alternatively, continuous intravenous infusions sufficient to maintain concentrations in the blood are contemplated.

[0395] Peptide-based immunogenic pharmaceutical compositions can be formulated using any of the well-known techniques, carriers, and excipients as suitable and as understood in the art. The polypeptides can be a cocktail of multiple polypeptides containing the same sequence, or a cocktail of multiple copies of different polypeptides. The peptides can be modified, such as for example by lipidation, or attachment to a carrier protein. Lipidation can be the covalent attachment of a lipid group to a polypeptide. Lipidated peptides, or lipidated polypeptides, can stabilize structures and can enhance efficacy of the treatment.

[0396] Lipidation can be classified into several different types, such as N-myristoylation, palmitoylation, GPI-anchor addition, prenylation, and several additional types of modifications. N-myristoylation is the covalent attachment of myristate, a C₁₄ saturated acid, to a glycine residue. Palmitoylation is thioester linkage of long-chain fatty acids (C₁₆) to cysteine residues. GPI-anchor addition is glycosyl-phosphatidylinositol (GPI) linkage via amide bond. Prenylation is the thioether linkage of an isoprenoid lipid (e.g. farnesyl (C-15), geranylgeranyl (C-20)) to cysteine residues. Additional types of modifications can include attachment of S-diacylglycerol by a sulfur atom of cysteines, O-octanoyl conjugation via serine or threonine residues, S-archaeol conjugation to cysteine residues, and cholesterol attachment.

[0397] Fatty acids for generating a lipidated peptides can include C₂ to C₃₀ saturated, monounsaturated, or polyunsaturated fatty acyl groups. Exemplary fatty acids can include palmitoyl, myristoyl, stearoyl and decanoyl groups. In some instances, a lipid moiety that has adjuvant property is attached to a polypeptide of interest to elicit or enhance immunogenicity in the absence of an extrinsic adjuvant. A lipidated peptide or lipopeptide can be referred to as a self-adjuvant lipopeptide. Any of the fatty acids described above and elsewhere herein can elicit or enhance immunogenicity of a polypeptide of interest. A fatty acid that can elicit or enhance immunogenicity can include palmitoyl, myristoyl, stearoyl, lauroyl, octanoyl, and decanoyl groups.

[0398] Polypeptides such as naked peptides or lipidated peptides can be incorporated into a liposome. Sometimes, lipidated peptides can be incorporated into a liposome. For example, the lipid portion of the lipidated peptide can spontaneously integrate into the lipid bilayer of a liposome. Thus, a lipopeptide can be presented on the “surface” of a liposome.

[0399] Exemplary liposomes suitable for incorporation in the formulations include, and are not limited to, multilamellar vesicles (MLV), oligolamellar vesicles (OLV), unilamellar vesicles (UV), small unilamellar vesicles (SUV), medium-sized unilamellar vesicles (MUV), large unilamellar vesicles (LUV), giant unilamellar vesicles (GUV), multivesicular vesicles (MVV), single or oligolamellar vesicles made by reverse-phase evaporation method (REV), multilamellar vesicles made by the reverse-phase evaporation method (MLV-REV), stable plurilamellar vesicles (SPLV), frozen and thawed MLV (FATMLV), vesicles prepared by extrusion methods (VET), vesicles prepared by French press (FPV), vesicles prepared by fusion (FUV), dehydration-rehydration vesicles (DRV), and bubblesomes (BSV).

[0400] Depending on the method of preparation, liposomes can be unilamellar or multilamellar, and can vary in size with diameters ranging from about 0.02 μm to greater than about 10 μm. Liposomes can adsorb many types of cells and then release an incorporated agent (e.g., a peptide described herein). In some cases, the liposomes fuse with the target cell, whereby the contents of the liposome then empty into the target cell. A liposome can be endocytosed by cells that are phagocytic. Endocytosis can be followed by intralysosomal degradation of liposomal lipids and release of the encapsulated agents.

[0401] The liposomes provided herein can also comprise carrier lipids. In some embodiments the carrier lipids are phospholipids. Carrier lipids capable of forming liposomes include, but are not limited to dipalmitoylphosphatidylcholine (DPPC), phosphatidylcholine (PC; lecithin), phosphatidic acid (PA), phosphatidylglycerol (PG), phosphatidylethanolamine (PE), phosphatidylserine (PS). Other suitable phospholipids further include distearoylphosphatidylcholine (DSPC), dimyristoylphosphatidylcholine (DMPC), dipalmitoylphosphatidyglycerol (DPPG), distearoylphosphatidyglycerol (DSPG), dimyristoylphosphatidylglycerol (DMPG), dipalmitoylphosphatidic acid (DPPA); dimyristoylphosphatidic acid (DMPA), distearoylphosphatidic acid (DSPA), dipalmitoylphosphatidylserine (DPPS), dimyristoylphosphatidylserine (DMPS), distearoylphosphatidylserine (DSPS), dipalmitoylphosphatidyethanolamine (DPPE), dimyristoylphosphatidylethanolamine (DMPE), distearoylphosphatidylethanolamine (DSPE) and the like, or combinations thereof. In some embodiments, the liposomes further comprise a sterol (e.g., cholesterol) which modulates liposome formation. The carrier lipids can be any known non-phosphate polar lipids.

[0402] A pharmaceutical composition can be encapsulated within liposomes using well-known technology. Biodegradable microspheres can also be employed as carriers for the pharmaceutical compositions of this invention.

[0403] The pharmaceutical composition can be administered in liposomes or microspheres (or microparticles). Methods for preparing liposomes and microspheres for administration to a patient are well known to those of skill in the art. Essentially, material is dissolved in an aqueous solution, the appropriate phospholipids and lipids added, along with surfactants if required, and the material dialyzed or sonicated, as necessary.

[0404] Microspheres formed of polymers or proteins are well known to those skilled in the art, and can be tailored for passage through the gastrointestinal tract directly into the blood stream. Alternatively, the compound can be incorporated and the microspheres, or composite of microspheres, implanted for slow release over a period of time ranging from days to months.

[0405] A polypeptide can also be attached to a carrier protein for delivery. The carrier protein can be an immunogenic carrier element and can be attached by any recombinant technology. Exemplary carrier proteins include Mariculture keyhole limpet hemocyanin (mcKLH), PEGylated mcKLH, Blue Carrier® Proteins, bovine serum albumin (BSA), cationized BSA, ovalbumin, and bacterial proteins such as tetanus toxoid (TT).

[0406] A polypeptide can also be prepared as multiple antigenic peptides (MAPs). Peptides may be attached at the N-terminus or the C-terminus to small non-immunogenic cores. Peptides built upon this core can offer highly localized peptide density. The core can be a dendritic core residue or matrix composed of bifunctional units. Suitable core molecules for constructing MAPs can include ammonia, ethylenediamine, aspartic acid, glutamic acid, and lysine. For example, a lysine core molecule can be attached via peptide bonds through each of its amino groups to two additional lysines.

[0407] A polypeptide can be chemically synthesized, or recombinantly expressed in a cell system or a cell-free system. A peptide can be synthesized, such as by a liquid-phase synthesis, a solid-phase synthesis, or by microwave assisted peptide synthesis. A polypeptide can be modified, such as for example, by acylation, alkylation, amidation, arginylation, polyglutamylation, polyglycylation, butyrylation, gamma-carboxylation, glycosylation, malonylation, hydroxylation, iodination, nucleotide addition (e.g. ADP-ribosylation), oxidation, phosphorylation, adenylylation, propionylation, S-glutathionylation, S-nitrosylation, succinylation, sulfation, glycation, palmitoylation, myristoylation, isoprenylation or prenylation (e.g. farnesylation or geranylgeranylation), glypiation, lipoylation, attachement of flavin moiety (e.g. FMN or FAD), attachment of heme C, phosphopantetheinylation, retinylidene Schiff base formation, diphthamide formation, ethanolamine phosphoglycerol attachment, hypusine formuation, biotinylation, pegylation, ISGylation, SUMUylation, ubiquitination, Neddylation, Pupylation, citrullination, deamidation, eliminylation, carbamylation, or a combination thereof.

[0408] After generation of a polypeptide, the polypeptide can be subjected to one or more rounds of purification steps to remove impurities. The purification step can be a chromatographic step utilizing separation methods such as affinity-based, size-exclusion based, ion-exchange based, or the like. In some cases, the polypeptide is at most 30%, 40%, 50%, 60%, 70%, 80%, 90%/0, 95%, 99%/0, 99.9%/0, or 100% pure or without the presence of impurities. In some cases, the polypeptide is at least 30%, 40%, 50%, 60%, 70%, 80%, 90%, 95%, 99%, 99.9%, or 100% pure or without the presence of impurities.

[0409] A polypeptide can include natural amino acids, unnatural amino acids, or a combination thereof. An amino acid residue can refer to a molecule containing both an amino group and a carboxyl group. Suitable amino acids include, without limitation, both the D- and L-isomers of the naturally-occurring amino acids, as well as non-naturally occurring amino acids prepared by organic synthesis or other metabolic routes. The term amino acid, as used herein, includes, without limitation, α-amino acids, natural amino acids, non-natural amino acids, and amino acid analogs.

[0410] The term “a-amino acid” can refer to a molecule containing both an amino group and a carboxyl group bound to a carbon which is designated the a-carbon.

[0411] The term “n-amino acid” can refer to a molecule containing both an amino group and a carboxyl group in a 0 configuration.

[0412] “Naturally occurring amino acid” can refer to any one of the twenty amino acids commonly found in peptides synthesized in nature, and known by the one letter abbreviations A, R, N, C, D, Q, E, G, H, I, L, K, M, F, P, S, T, W, Y and V. A table showing a summary of the properties of natural amino acids can be found, e.g., in U.S. Patent Application Publication No. 20130123169, which is herein incorporated by reference.

[0413] A peptide provided herein can comprise one or more hydrophobic, polar, or charged amino acids. “Hydrophobic amino acids” include small hydrophobic amino acids and large hydrophobic amino acids. “Small hydrophobic amino acid” can be glycine, alanine, proline, and analogs thereof. “Large hydrophobic amino acids” can be valine, leucine, isoleucine, phenylalanine, methionine, tryptophan, and analogs thereof. “Polar amino acids” can be serine, threonine, asparagine, glutamine, cysteine, tyrosine, and analogs thereof. “Charged amino acids” can be lysine, arginine, histidine, aspartate, glutamate, and analogs thereof.

[0414] A peptide provided herein can comprise one or more amino acid analogs. An “amino acid analog” can be a molecule which is structurally similar to an amino acid and which can be substituted for an amino acid in the formation of a peptidomimetic macrocycle Amino acid analogs include, without limitation, β-amino acids and amino acids where the amino or carboxy group is substituted by a similarly reactive group (e.g., substitution of the primary amine with a secondary or tertiary amine, or substitution of the carboxy group with an ester).

[0415] A peptide provided herein can comprises one or more non-natural amino acids. A “non-natural amino acid” can be an amino acid which is not one of the twenty amino acids commonly found in peptides synthesized in nature, and known by the one letter abbreviations A, R, N, C, D, Q, E, G, H, I, L, K, M, F, P, S, T, W, Y and V. Non-natural amino acids or amino acid analogs include structures disclosed, e.g., in U.S. Patent Application Publication No. 20130123169, which is herein incorporated by reference.

[0416] Amino acid analogs can include n-amino acid analogs. Examples of β-amino acid analogs and analogs of alanine, valine, glycine, leucine, arginine, lysine, aspartic acids, glutamic acids, cysteine, methionine, phenylalanine, tyrosine, proline, serine, threonine, and tryptophan can include structures disclosed, e.g., in U.S. Patent Application Publication No. 20130123169, which is herein incorporated by reference.

[0417] Amino acid analogs can be racemic. In some instances, the D isomer of the amino acid analog is used. In some cases, the L isomer of the amino acid analog is used. In some instances, the amino acid analog comprises chiral centers that are in the R or S configuration. Sometimes, the amino group(s) of a β-amino acid analog is substituted with a protecting group, e.g., tert-butyloxycarbonyl (BOC group), 9-fluorenylmethyloxycarbonyl (FMOC), tosyl, and the like. Sometimes, the carboxylic acid functional group of a B-amino acid analog is protected, e.g., as its ester derivative. In some cases, the salt of the amino acid analog is used.

[0418] A “non-essential” amino acid residue can be a residue that can be altered from the wild-type sequence of a polypeptide without abolishing or substantially altering its essential biological or biochemical activity (e.g., receptor binding or activation). An “essential” amino acid residue can be a residue that, when altered from the wild-type sequence of the polypeptide, results in abolishing or substantially abolishing the polypeptide's essential biological or biochemical activity.

[0419] A “conservative amino acid substitution” can be one in which the amino acid residue is replaced with an amino acid residue having a similar side chain. Families of amino acid residues having similar side chains have been defined in the art. These families can include amino acids with basic side chains (e.g., K, R, H), acidic side chains (e.g., D, E), uncharged polar side chains (e.g., G, N, Q, S, T, Y, C), nonpolar side chains (e.g., A, V, L, I, P, F, M, W), beta-branched side chains (e.g., T, V, I) and aromatic side chains (e.g., Y, F, W, H). Thus, a predicted nonessential amino acid residue in a polypeptide, for example, can be replaced with another amino acid residue from the same side chain family. Other examples of acceptable substitutions can be substitutions based on isosteric considerations (e.g. norleucine for methionine) or other properties (e.g. 2-thienylalanine for phenylalanine, or 6-Cl-tryptophan for tryptophan).

[0420] Nucleic acid-based immunogenic pharmaceutical compositions can also be administered to a subject. Nucleic acid-based immunogenic pharmaceutical compositions can be formulated using any of the well-known techniques, carriers, and excipients as suitable and as understood in the art. The nucleic acid can be DNA, genomic DNA or cDNA, RNA, or a hybrid, where the nucleic acid may contain combinations of deoxyribo- and ribo-nucleotides, and combinations of bases including uracil, adenine, thymine, cytosine, guanine, inosine, xanthine hypoxanthine, isocytosine and isoguanine. Nucleic acids can be obtained by chemical synthesis methods or by recombinant methods. The immunogenic pharmaceutical composition can be a DNA-based immunogenic pharmaceutical composition, an RNA-based immunogenic pharmaceutical composition, a hybrid DNA/RNA based immunogenic pharmaceutical composition, or a hybrid nucleic acid/peptide based immunogenic pharmaceutical composition. The peptide can be a peptide derived from a peptide in Table 1 or 2, a peptide that has a sequence that is at least 40%, 50%, 60%/0, 70%, 80%, 90%, 95%, or more in sequence homology to a peptide in Table 1 or 2, or a peptide that has a sequence that is at most 40%/0, 50%, 60%, 70%, 80%, 90%, 95%, or less in sequence homology to a peptide in Table 1 or 2.

[0421] A nucleic acid described herein can contain phosphodiester bonds, although in some cases, as outlined below (for example in the construction of primers and probes such as label probes), nucleic acid analogs are included that can have alternate backbones, comprising, for example, phosphoramide, phosphorothioate, O-methylphosphoroamidite linkages, and peptide nucleic acid backbones and linkages. Other analog nucleic acids include those with bicyclic structures including locked nucleic acids, positive backbones and non-ribose backbones. Nucleic acids containing one or more carbocyclic sugars are also included within the definition of nucleic acids. Locked nucleic acids (LNAs) are also included within the definition of nucleic acid analogs. LNAs are a class of nucleic acid analogues in which the ribose ring is “locked” by a methylene bridge connecting the 2′-0 atom with the 4′-C atom. These modifications of the ribose-phosphate backbone can be done to increase the stability and half-life of such molecules in physiological environments. For example, PNA:DNA and LNA-DNA hybrids can exhibit higher stability and thus can be used in some embodiments. The nucleic acids can be single stranded or double stranded, as specified, or contain portions of both double stranded or single stranded sequence. Depending on the application, the nucleic acids can be DNA (including, e.g., genomic DNA, mitochondrial DNA, and cDNA), RNA (including, e.g., mRNA and rRNA) or a hybrid, where the nucleic acid contains any combination of deoxyribo- and ribo-nucleotides, and any combination of bases, including uracil, adenine, thymine, cytosine, guanine, inosine, xathanine hypoxathanine, isocytosine, isoguanine, etc.

[0422] A nucleic acid-based immunogenic pharmaceutical compositions can be in the form of a vector. A vector can be a circular plasmid or a linear nucleic acid. A circular plasmid or linear nucleic acid can be capable of directing expression of a particular nucleotide sequence in an appropriate subject cell. A vector can have a promoter operably linked to the polypeptide-encoding nucleotide sequence, which can be operably linked to termination signals. A vector can contain sequences required for proper translation of the nucleotide sequence. The vector comprising the nucleotide sequence of interest can be chimeric, meaning that at least one of its components can be heterologous with respect to at least one of its other components. The expression of the nucleotide sequence in an expression cassette can be under the control of a constitutive promoter or of an inducible promoter, which can initiate transcription only when the host cell is exposed to some particular internal or external stimulus.

[0423] The vector can be a plasmid. A plasmid can be useful for transfecting cells with nucleic acid encoding the polypeptide, and the transformed host cells can be cultured and maintained under conditions wherein expression of the polypeptide takes place.

[0424] A plasmid can comprise a nucleic acid sequence that encodes one or more of the various polypeptides disclosed herein. A single plasmid can contain coding sequence for a single polypeptide, or coding sequence for more than one polypeptide. Sometimes, the plasmid can further comprise coding sequence that encodes an adjuvant, such as an immune stimulating molecule, such as a cytokine.

[0425] A plasmid can further comprise an initiation codon, which can be upstream of the coding sequence, and a stop codon, which can be downstream of the coding sequence. The initiation and termination codon can be in frame with the coding sequence. A plasmid can also comprise a promoter that is operably linked to the coding sequence, and an enhancer upstream of the coding sequence. The enhancer can be human actin, human myosin, human hemoglobin, human muscle creatine or a viral enhancer such as one from CMV, FMDV, RSV or EBV.

[0426] A plasmid can also comprise a mammalian origin of replication in order to maintain the plasmid extrachromosomally and produce multiple copies of the plasmid in a cell. A plasmid can also comprise a regulatory sequence, which can be well suited for gene expression in a cell into which the plasmid is administered. The coding sequence can comprise a codon that can allow more efficient transcription of the coding sequence in the host cell.

[0427] The nucleic acid based immunogenic pharmaceutical compositions can also be a linear nucleic acid immunogenic pharmaceutical composition, or linear expression cassette, that is capable of being efficiently delivered to a subject via electroporation and expressing one or more polypeptides disclosed herein.

[0428] Cell-based immunogenic pharmaceutical compositions can also be administered to a subject. For example, an antigen presenting cell (APC) based immunogenic pharmaceutical composition can be formulated using any of the well-known techniques, carriers, and excipients as suitable and as understood in the art. APCs include monocytes, monocyte-derived cells, macrophages, and dendritic cells. Sometimes, an APC based immunogenic pharmaceutical composition can be a dendritic cell-based immunogenic pharmaceutical composition.

[0429] A dendritic cell-based immunogenic pharmaceutical composition can be prepared by any methods well known in the art. In some cases, dendritic cell-based immunogenic pharmaceutical compositions can be prepared through an ex vivo or in vivo method. The ex vivo method can comprise the use of autologous DCs pulsed ex vivo with the polypeptides described herein, to activate or load the DCs prior to administration into the patient. The in vivo method can comprise targeting specific DC receptors using antibodies coupled with the polypeptides described herein. The DC-based immunogenic pharmaceutical composition can further comprise DC activators such as TLR3, TLR-7-8, and CD40 agonists. The DC-based immunogenic pharmaceutical composition can further comprise adjuvants, and a pharmaceutically acceptable carrier.

[0430] An adjuvant can be used to enhance the immune response (humoral and/or cellular) elicited in a patient receiving the immunogenic pharmaceutical composition. Sometimes, adjuvants can elicit a Th1-type response. Other times, adjuvants can elicit a Th2-type response. A Th1-type response can be characterized by the production of cytokines such as IFN-γ as opposed to a Th2-type response which can be characterized by the production of cytokines such as IL-4, IL-5 and IL-10.

[0431] In some aspects, lipid-based adjuvants, such as MPLA and MDP, can be used with the immunogenic pharmaceutical compositions disclosed herein. Monophosphoryl lipid A (MPLA), for example, is an adjuvant that causes increased presentation of liposomal antigen to specific T Lymphocytes. In addition, a muramyl dipeptide (MDP) can also be used as a suitable adjuvant in conjunction with the immunogenic pharmaceutical formulations described herein.

[0432] Adjuvant can also comprise stimulatory molecules such as cytokines. Non-limiting examples of cytokines include: CCL20, a-interferon (IFN-a), β-interferon (IFN-β), γ-interferon, platelet derived growth factor (PDGF), TNFa, TNFp, GM-CSF, epidermal growth factor (EGF), cutaneous T cell-attracting chemokine (CTACK), epithelial thymus-expressed chemokine (TECK), mucosae-associated epithelial chemokine (MEC), IL-12, IL-15, IL-28, MHC, CD80, CD86, IL-1, IL-2, IL-4, IL-5, IL-6, IL-10, IL-18, MCP-1, MIP-1a, MIP-1-, IL-8, L-selectin, P-selectin, E-selectin, CD34, GlyCAM-1, MadCAM-1, LFA-1, VLA-1, Mac-1, p150.95, PECAM, ICAM-1, ICAM-2, ICAM-3, CD2, LFA-3, M-CSF, G-CSF, mutant forms of IL-18, CD40, CD40L, vascular growth factor, fibroblast growth factor, IL-7, nerve growth factor, vascular endothelial growth factor, Fas, TNF receptor, Fit, Apo-1, p55, WSL-1, DR3, TRAMP, Apo-3, AIR, LARD, NGRF, DR4, DRS, KILLER, TRAIL-R2, TRICK2, DR6, Caspase ICE, Fos, c-jun, Sp-1, Ap-1, Ap-2, p38, p65Rel, MyD88, IRAK, TRAF6, IkB, Inactive NIK, SAP K, SAP-I, JNK, interferon response genes, NFkB, Bax, TRAIL, TRAILrec, TRAILrecDRCS, TRAIL-R3, TRAIL-R4, RANK, RANK LIGAND, Ox40, Ox40 LIGAND, NKG2D, MICA, MICB, NKG2A, NKG2B, NKG2C, NKG2E, NKG2F, TAPI, and TAP2.

[0433] Additional adjuvants include: MCP-1, MIP-1a, MIP-1p, IL-8, RANTES, L-selectin, P-selectin, E-selectin, CD34, GlyCAM-1, MadCAM-1, LFA-1, VLA-1, Mac-1, p150.95, PECAM, ICAM-1, ICAM-2, ICAM-3, CD2, LFA-3, M-CSF, G-CSF, IL-4, mutant forms of IL-18, CD40, CD40L, vascular growth factor, fibroblast growth factor, IL-7, IL-22, nerve growth factor, vascular endothelial growth factor, Fas, TNF receptor, Fit, Apo-1, p55, WSL-1, DR3, TRAMP, Apo-3, AIR, LARD, NGRF, DR4, DR5, KILLER, TRAIL-R2, TRICK2, DR6, Caspase ICE, Fos, c-jun, Sp-1, Ap-1, Ap-2, p38, p65Rel, MyD88, IRAK, TRAF6, IkB, Inactive NIK, SAP K, SAP-1, JNK, interferon response genes, NFkB, Bax, TRAIL, TRAILrec, TRAILrecDRCS, TRAIL-R3, TRAIL-R4, RANK, RANK LIGAND, Ox40, Ox40 LIGAND, NKG2D, MICA, MICB, NKG2A, NKG2B, NKG2C, NKG2E, NKG2F, TAP1, TAP2 and functional fragments thereof.

[0434] In some aspects, an adjuvant can be a modulator of a toll like receptor. Examples of modulators of toll-like receptors include TLR-9 agonists and are not limited to small molecule modulators of toll-like receptors such as Imiquimod. Other examples of adjuvants that are used in combination with an immunogenic pharmaceutical composition described herein can include and are not limited to saponin, CpG ODN and the like. Sometimes, an adjuvant is selected from bacteria toxoids, polyoxypropylene-polyoxyethylene block polymers, aluminum salts, liposomes, CpG polymers, oil-in-water emulsions, or a combination thereof. Sometimes, an adjuvant is an oil-in-water emulsion. The oil-in-water emulsion can include at least one oil and at least one surfactant, with the oil(s) and surfactant(s) being biodegradable (metabolisable) and biocompatible. The oil droplets in the emulsion can be less than 5 μm in diameter, and can even have a sub-micron diameter, with these small sizes being achieved with a microfluidiser to provide stable emulsions. Droplets with a size less than 220 nm can be subjected to filter sterilization.

[0435] In some instances, an immunogenic pharmaceutical composition can include carriers and excipients (including but not limited to buffers, carbohydrates, mannitol, proteins, polypeptides or amino acids such as glycine, antioxidants, bacteriostats, chelating agents, suspending agents, thickening agents and/or preservatives), water, oils including those of petroleum, animal, vegetable or synthetic origin, such as peanut oil, soybean oil, mineral oil, sesame oil and the like, saline solutions, aqueous dextrose and glycerol solutions, flavoring agents, coloring agents, detackifiers and other acceptable additives, adjuvants, or binders, other pharmaceutically acceptable auxiliary substances as required to approximate physiological conditions, such as pH buffering agents, tonicity adjusting agents, emulsifying agents, wetting agents and the like. Examples of excipients include starch, glucose, lactose, sucrose, gelatin, malt, rice, flour, chalk, silica gel, sodium stearate, glycerol monostearate, talc, sodium chloride, dried skim milk, glycerol, propylene, glycol, water, ethanol and the like. In another instances, the pharmaceutical preparation is substantially free of preservatives. In other instances, the pharmaceutical preparation can contain at least one preservative. It will be recognized that, while any suitable carrier known to those of ordinary skill in the art can be employed to administer the pharmaceutical compositions described herein, the type of carrier will vary depending on the mode of administration.

[0436] An immunogenic pharmaceutical composition can include preservatives such as thiomersal or 2-phenoxyethanol. In some instances, the immunogenic pharmaceutical composition is substantially free from (e.g. <10 μg/ml) mercurial material e.g. thiomersal-free. a-Tocopherol succinate may be used as an alternative to mercurial compounds.

[0437] For controlling the tonicity, a physiological salt such as sodium salt can be included in the immunogenic pharmaceutical composition. Other salts can include potassium chloride, potassium dihydrogen phosphate, disodium phosphate, and/or magnesium chloride, or the like.

[0438] An immunogenic pharmaceutical composition can have an osmolality of between 200 mOsm/kg and 400 mOsm/kg, between 240-360 mOsm/kg, or within the range of 290-310 mOsm/kg.

[0439] An immunogenic pharmaceutical composition can comprise one or more buffers, such as a Tris buffer, a borate buffer; a succinate buffer, a histidine buffer (particularly with an aluminum hydroxide adjuvant); or a citrate buffer. Buffers, in some cases, are included in the 5-20 mM range.

[0440] The pH of the immunogenic pharmaceutical composition can be between about 5.0 and about 8.5, between about 6.0 and about 8.0, between about 6.5 and about 7.5, or between about 7.0 and about 7.8.

[0441] An immunogenic pharmaceutical composition can be sterile. The immunogenic pharmaceutical composition can be non-pyrogenic e.g. containing <1 EU (endotoxin unit, a standard measure) per dose, and can be <0.1 EU per dose. The composition can be gluten free.

[0442] An immunogenic pharmaceutical composition can include detergent e.g. a polyoxyethylene sorbitan ester surfactant (known as ‘Tweens’), or an octoxynol (such as octoxynol-9 (Triton X-100) or t-octylphenoxypolyethoxyethanol). The detergent can be present only at trace amounts. The immunogenic pharmaceutical composition can include less than 1 mg/ml of each of octoxynol-10 and polysorbate 80. Other residual components in trace amounts can be antibiotics (e.g. neomycin, kanamycin, polymyxin B).

[0443] An immunogenic pharmaceutical composition can be formulated as a sterile solution or suspension, in suitable vehicles, well known in the art. The pharmaceutical compositions can be sterilized by conventional, well-known sterilization techniques, or can be sterile filtered. The resulting aqueous solutions can be packaged for use as is, or lyophilized, the lyophilized preparation being combined with a sterile solution prior to administration.

[0444] An immunogenic pharmaceutical composition can be formulated with one or more pharmaceutically acceptable salts. Pharmaceutically acceptable salts can include those of the inorganic ions, such as, for example, sodium, potassium, calcium, magnesium ions, and the like. Such salts can include salts with inorganic or organic acids, such as hydrochloric acid, hydrobromic acid, phosphoric acid, nitric acid, sulfuric acid, methanesulfonic acid, p-toluenesulfonic acid, acetic acid, fumaric acid, succinic acid, lactic acid, mandelic acid, malic acid, citric acid, tartaric acid or maleic acid. In addition, if the agent(s) contain a carboxy group or other acidic group, it can be converted into a pharmaceutically acceptable addition salt with inorganic or organic bases. Examples of suitable bases include sodium hydroxide, potassium hydroxide, ammonia, cyclohexylamine, dicyclohexyl-amine, ethanolamine, diethanolamine, triethanolamine, and the like.

[0445] Pharmaceutical compositions comprising, for example, an active agent such as a peptide, a nucleic acid, an antibody or fragments thereof, and/or an APC described herein, in combination with one or more adjuvants can be formulated to comprise certain molar ratios. For example, molar ratios of about 99:1 to about 1:99 of an active agent such as a peptide, a nucleic acid, an antibody or fragments thereof, and/or an APC described herein, in combination with one or more adjuvants can be used. In some instances, the range of molar ratios of an active agent such as a peptide, a nucleic acid, an antibody or fragments thereof, and/or an APC described herein, in combination with one or more adjuvants can be selected from about 80:20 to about 20:80; about 75:25 to about 25:75, about 70:30 to about 30:70, about 66:33 to about 33:66, about 60:40 to about 40:60; about 50:50; and about 90:10 to about 10:90. The molar ratio of an active agent such as a peptide, a nucleic acid, an antibody or fragments thereof, and/or an APC described herein, in combination with one or more adjuvants can be about 1:9, and in some cases can be about 1:1. The active agent such as a peptide, a nucleic acid, an antibody or fragments thereof, and/or an APC described herein, in combination with one or more adjuvants can be formulated together, in the same dosage unit e.g., in one vial, suppository, tablet, capsule, an aerosol spray; or each agent, form, and/or compound can be formulated in separate units, e.g., two vials, suppositories, tablets, two capsules, a tablet and a vial, an aerosol spray, and the like.

[0446] In some instances, an immunogenic pharmaceutical composition can be administered with an additional agent. The choice of the additional agent can depend, at least in part, on the condition being treated. The additional agent can include, for example, any agents having a therapeutic effect for a pathogen infection (e.g. viral infection), including, e.g., drugs used to treat inflammatory conditions such as an NSAID, e.g., ibuprofen, naproxen, acetaminophen, ketoprofen, or aspirin. As another example, formulations can additionally contain one or more supplements, such as vitamin C, E or other anti-oxidants.

[0447] A pharmaceutical composition comprising an active agent such as a peptide, a nucleic acid, an antibody or fragments thereof, and/or an APC described herein, in combination with one or more adjuvants can be formulated in conventional manner using one or more physiologically acceptable carriers, comprising excipients, diluents, and/or auxiliaries, e.g., which facilitate processing of the active agents into preparations that can be administered. Proper formulation can depend at least in part upon the route of administration chosen. The agent(s) described herein can be delivered to a patient using a number of routes or modes of administration, including oral, buccal, topical, rectal, transdermal, transmucosal, subcutaneous, intravenous, and intramuscular applications, as well as by inhalation.

[0448] The active agents can be formulated for parenteral administration (e.g., by injection, for example bolus injection or continuous infusion) and can be presented in unit dose form in ampoules, pre-filled syringes, small volume infusion or in multi-dose containers with an added preservative. The compositions can take such forms as suspensions, solutions, or emulsions in oily or aqueous vehicles, for example solutions in aqueous polyethylene glycol.

[0449] For injectable formulations, the vehicle can be chosen from those known in art to be suitable, including aqueous solutions or oil suspensions, or emulsions, with sesame oil, corn oil, cottonseed oil, or peanut oil, as well as elixirs, mannitol, dextrose, or a sterile aqueous solution, and similar pharmaceutical vehicles. The formulation can also comprise polymer compositions which are biocompatible, biodegradable, such as poly(lactic-co-glycolic)acid. These materials can be made into micro or nanospheres, loaded with drug and further coated or derivatized to provide superior sustained release performance. Vehicles suitable for periocular or intraocular injection include, for example, suspensions of therapeutic agent in injection grade water, liposomes and vehicles suitable for lipophilic substances. Other vehicles for periocular or intraocular injection are well known in the art.

[0450] In some instances, pharmaceutical composition is formulated in accordance with routine procedures as a pharmaceutical composition adapted for intravenous administration to human beings. Typically, compositions for intravenous administration are solutions in sterile isotonic aqueous buffer. Where necessary, the composition can also include a solubilizing agent and a local anesthetic such as lidocaine to ease pain at the site of the injection. Generally, the ingredients are supplied either separately or mixed together in unit dosage form, for example, as a dry lyophilized powder or water free concentrate in a hermetically sealed container such as an ampoule or sachette indicating the quantity of active agent. Where the composition is to be administered by infusion, it can be dispensed with an infusion bottle containing sterile pharmaceutical grade water or saline. Where the composition is administered by injection, an ampoule of sterile water for injection or saline can be provided so that the ingredients can be mixed prior to administration.

[0451] When administration is by injection, the active agent can be formulated in aqueous solutions, specifically in physiologically compatible buffers such as Hanks solution, Ringer's solution, or physiological saline buffer. The solution can contain formulatory agents such as suspending, stabilizing and/or dispersing agents. Alternatively, the active compound can be in powder form for constitution with a suitable vehicle, e.g., sterile pyrogen-free water, before use. In another embodiment, the pharmaceutical composition does not comprise an adjuvant or any other substance added to enhance the immune response stimulated by the peptide. In another embodiment, the pharmaceutical composition comprises a substance that inhibits an immune response to the peptide.

[0452] In addition to the formulations described previously, the active agents can also be formulated as a depot preparation. Such long acting formulations can be administered by implantation or transcutaneous delivery (for example subcutaneously or intramuscularly), intramuscular injection or use of a transdermal patch. Thus, for example, the agents can be formulated with suitable polymeric or hydrophobic materials (for example as an emulsion in an acceptable oil) or ion exchange resins, or as sparingly soluble derivatives, for example, as a sparingly soluble salt.

[0453] In cases, pharmaceutical compositions comprising one or more agents exert local and regional effects when administered topically or injected at or near particular sites of infection. Direct topical application, e.g., of a viscous liquid, solution, suspension, dimethylsulfoxide (DMSO)-based solutions, liposomal formulations, gel, jelly, cream, lotion, ointment, suppository, foam, or aerosol spray, can be used for local administration, to produce for example local and/or regional effects. Pharmaceutically appropriate vehicles for such formulation include, for example, lower aliphatic alcohols, polyglycols (e.g., glycerol or polyethylene glycol), esters of fatty acids, oils, fats, silicones, and the like. Such preparations can also include preservatives (e.g., p-hydroxybenzoic acid esters) and/or antioxidants (e.g., ascorbic acid and tocopherol). See also Dermatological Formulations: Percutaneous absorption, Barry (Ed.), Marcel Dekker Incl, 1983. In another embodiment, local/topical formulations comprising a transporter, carrier, or ion channel inhibitor are used to treat epidermal or mucosal viral infections.

[0454] Pharmaceutical compositions can contain a cosmetically or dermatologically acceptable carrier. Such carriers are compatible with skin, nails, mucous membranes, tissues and/or hair, and can include any conventionally used cosmetic or dermatological carrier meeting these requirements. Such carriers can be readily selected by one of ordinary skill in the art. In formulating skin ointments, an agent or combination of agents can be formulated in an oleaginous hydrocarbon base, an anhydrous absorption base, a water-in-oil absorption base, an oil-in-water water-removable base and/or a water-soluble base. Examples of such carriers and excipients include, but are not limited to, humectants (e.g., urea), glycols (e.g., propylene glycol), alcohols (e.g., ethanol), fatty acids (e.g., oleic acid), surfactants (e.g., isopropyl myristate and sodium lauryl sulfate), pyrrolidones, glycerol monolaurate, sulfoxides, terpenes (e.g., menthol), amines, amides, alkanes, alkanols, water, calcium carbonate, calcium phosphate, various sugars, starches, cellulose derivatives, gelatin, and polymers such as polyethylene glycols.

[0455] Ointments and creams can, for example, be formulated with an aqueous or oily base with the addition of suitable thickening and/or gelling agents. Lotions can be formulated with an aqueous or oily base and will in general also containing one or more emulsifying agents, stabilizing agents, dispersing agents, suspending agents, thickening agents, or coloring agents. The construction and use of transdermal patches for the delivery of pharmaceutical agents is well known in the art. Such patches can be constructed for continuous, pulsatile, or on demand delivery of pharmaceutical agents.

[0456] Lubricants which can be used to form pharmaceutical compositions and dosage forms can include, but are not limited to, calcium stearate, magnesium stearate, mineral oil, light mineral oil, glycerin, sorbitol, mannitol, polyethylene glycol, other glycols, stearic acid, sodium lauryl sulfate, talc, hydrogenated vegetable oil (e.g., peanut oil, cottonseed oil, sunflower oil, sesame oil, olive oil, corn oil, and soybean oil), zinc stearate, ethyl oleate, ethyl laureate, agar, or mixtures thereof. Additional lubricants include, for example, a syloid silica gel, a coagulated aerosol of synthetic silica, or mixtures thereof. A lubricant can optionally be added, in an amount of less than about 1 weight percent of the pharmaceutical composition.

[0457] The pharmaceutical compositions can be in any form suitable for topical application, including aqueous, aqueous-alcoholic or oily solutions, lotion or serum dispersions, aqueous, anhydrous or oily gels, emulsions obtained by dispersion of a fatty phase in an aqueous phase (O/W or oil in water) or, conversely, (W/O or water in oil), microemulsions or alternatively microcapsules, microparticles or lipid vesicle dispersions of ionic and/or nonionic type. These compositions can be prepared according to conventional methods. The amounts of the various constituents of the compositions are those conventionally used in the art. These compositions in particular constitute protection, treatment or care creams, milks, lotions, gels or foams for the face, for the hands, for the body and/or for the mucous membranes, or for cleansing the skin. The compositions can also consist of solid preparations constituting soaps or cleansing bars.

[0458] Pharmaceutical compositions can contain adjuvants such as hydrophilic or lipophilic gelling agents, hydrophilic or lipophilic active agents, preserving agents, antioxidants, solvents, fragrances, fillers, sunscreens, odor-absorbers and dyestuffs. The amounts of these various adjuvants are those conventionally used in the fields considered and, for example, are from about 0.01% to about 20% of the total weight of the composition. Depending on their nature, these adjuvants can be introduced into the fatty phase, into the aqueous phase and/or into the lipid vesicles.

[0459] In instances relating to topical/local application, the pharmaceutical compositions can include one or more penetration enhancers. For example, the formulations can comprise suitable solid or gel phase carriers or excipients that increase penetration or help delivery of agents or combinations of agents of the invention across a permeability barrier, e.g., the skin. Many of these penetration-enhancing compounds are known in the art of topical formulation, and include, e.g., water, alcohols (e.g., terpenes like methanol, ethanol, 2-propanol), sulfoxides (e.g., dimethyl sulfoxide, decylmethyl sulfoxide, tetradecylmethyl sulfoxide), pyrrolidones (e.g., 2-pyrrolidone, N-methyl-2-pyrrolidone, N-(2-hydroxyethyl)pyrrolidone), laurocapram, acetone, dimethylacetamide, dimethylformamide, tetrahydrofurfuryl alcohol, L-a-amino acids, anionic, cationic, amphoteric or nonionic surfactants (e.g., isopropyl myristate and sodium lauryl sulfate), fatty acids, fatty alcohols (e.g., oleic acid), amines, amides, clofibric acid amides, hexamethylene lauramide, proteolytic enzymes, a-bisabolol, d-limonene, urea and N,N-diethyl-m-toluamide, and the like. Additional examples include humectants (e.g., urea), glycols (e.g., propylene glycol and polyethylene glycol), glycerol monolaurate, alkanes, alkanols, ORGELASE, calcium carbonate, calcium phosphate, various sugars, starches, cellulose derivatives, gelatin, and/or other polymers. In another embodiment, the pharmaceutical compositions will include one or more such penetration enhancers.

[0460] The pharmaceutical compositions for local/topical application can include one or more antimicrobial preservatives such as quaternary ammonium compounds, organic mercurials, p-hydroxy benzoates, aromatic alcohols, chlorobutanol, and the like.

[0461] The pharmaceutical compositions can be formulated into aerosol solutions, suspensions or dry powders. The aerosol can be administered through the respiratory system or nasal passages. For example, one skilled in the art will recognize that a composition of the present invention can be suspended or dissolved in an appropriate carrier, e.g., a pharmaceutically acceptable propellant, and administered directly into the lungs using a nasal spray or inhalant. For example, an aerosol formulation comprising a transporter, carrier, or ion channel inhibitor can be dissolved, suspended or emulsified in a propellant or a mixture of solvent and propellant, e.g., for administration as a nasal spray or inhalant. Aerosol formulations can contain any acceptable propellant under pressure, such as a cosmetically or dermatologically or pharmaceutically acceptable propellant, as conventionally used in the art.

[0462] An aerosol formulation for nasal administration is generally an aqueous solution designed to be administered to the nasal passages in drops or sprays. Nasal solutions can be similar to nasal secretions in that they are generally isotonic and slightly buffered to maintain a pH of about 5.5 to about 6.5, although pH values outside of this range can additionally be used. Antimicrobial agents or preservatives can also be included in the formulation.

[0463] An aerosol formulation for inhalations and inhalants can be designed so that the agent or combination of agents is carried into the respiratory tree of the subject when administered by the nasal or oral respiratory route. Inhalation solutions can be administered, for example, by a nebulizer. Inhalations or insufflations, comprising finely powdered or liquid drugs, can be delivered to the respiratory system as a pharmaceutical aerosol of a solution or suspension of the agent or combination of agents in a propellant, e.g., to aid in disbursement. Propellants can be liquefied gases, including halocarbons, for example, fluorocarbons such as fluorinated chlorinated hydrocarbons, hydrochlorofluorocarbons, and hydrochlorocarbons, as well as hydrocarbons and hydrocarbon ethers.

[0464] Halocarbon propellants can include fluorocarbon propellants in which all hydrogens are replaced with fluorine, chlorofluorocarbon propellants in which all hydrogens are replaced with chlorine and at least one fluorine, hydrogen-containing fluorocarbon propellants, and hydrogen-containing chlorofluorocarbon propellants. Hydrocarbon propellants useful in the invention include, for example, propane, isobutane, n-butane, pentane, isopentane and neopentane. A blend of hydrocarbons can also be used as a propellant Ether propellants include, for example, dimethyl ether as well as the ethers. An aerosol formulation of the invention can also comprise more than one propellant. For example, the aerosol formulation can comprise more than one propellant from the same class, such as two or more fluorocarbons; or more than one, more than two, more than three propellants from different classes, such as a fluorohydrocarbon and a hydrocarbon. Pharmaceutical compositions of the present invention can also be dispensed with a compressed gas, e.g., an inert gas such as carbon dioxide, nitrous oxide or nitrogen.

[0465] Aerosol formulations can also include other components, for example, ethanol, isopropanol, propylene glycol, as well as surfactants or other components such as oils and detergents. These components can serve to stabilize the formulation and/or lubricate valve components.

[0466] The aerosol formulation can be packaged under pressure and can be formulated as an aerosol using solutions, suspensions, emulsions, powders and semisolid preparations. For example, a solution aerosol formulation can comprise a solution of an agent of the invention such as a transporter, carrier, or ion channel inhibitor in (substantially) pure propellant or as a mixture of propellant and solvent. The solvent can be used to dissolve the agent and/or retard the evaporation of the propellant. Solvents can include, for example, water, ethanol and glycols. Any combination of suitable solvents can be use, optionally combined with preservatives, antioxidants, and/or other aerosol components.

[0467] An aerosol formulation can be a dispersion or suspension. A suspension aerosol formulation can comprise a suspension of an agent or combination of agents of the instant invention, e.g., a transporter, carrier, or ion channel inhibitor, and a dispersing agent. Dispersing agents can include, for example, sorbitan trioleate, oleyl alcohol, oleic acid, lecithin and corn oil. A suspension aerosol formulation can also include lubricants, preservatives, antioxidant, and/or other aerosol components.

[0468] An aerosol formulation can similarly be formulated as an emulsion. An emulsion aerosol formulation can include, for example, an alcohol such as ethanol, a surfactant, water and a propellant, as well as an agent or combination of agents of the invention, e.g., a transporter, carrier, or ion channel. The surfactant used can be nonionic, anionic or cationic. One example of an emulsion aerosol formulation comprises, for example, ethanol, surfactant, water and propellant. Another example of an emulsion aerosol formulation comprises, for example, vegetable oil, glyceryl monostearate and propane.

[0469] The pharmaceutical compounds can be formulated for administration as suppositories. A low melting wax, such as a mixture of triglycerides, fatty acid glycerides, Witepsol S55 (trademark of Dynamite Nobel Chemical, Germany), or cocoa butter is first melted and the active component is dispersed homogeneously, for example, by stirring. The molten homogeneous mixture is then poured into convenient sized molds, allowed to cool, and to solidify.

[0470] The pharmaceutical compositions can be formulated for vaginal administration. Pessaries, tampons, creams, gels, pastes, foams or sprays containing in addition to the active ingredient such carriers as are known in the art to be appropriate.

[0471] The pharmaceutical compositions can be attached releasably to biocompatible polymers for use in sustained release formulations on, in or attached to inserts for topical, intraocular, periocular, or systemic administration. The controlled release from a biocompatible polymer can be utilized with a water soluble polymer to form a instillable formulation, as well. The controlled release from a biocompatible polymer, such as for example, PLGA microspheres or nanospheres, can be utilized in a formulation suitable for intra ocular implantation or injection for sustained release administration, as well. Any suitable biodegradable and biocompatible polymer can be used.

### IV. Combinations of CTL Peptides and HTL Peptides

[0472] Immunogenic or vaccine compositions comprising the neoantigenic polypeptides and polynucleotides described herein, or analogs thereof, which have immunostimulatory activity can be modified to provide desired attributes, such as improved serum half-life, or to enhance immunogenicity.

[0473] For instance, the ability of the neoantigenic peptides to induce CTL activity can be enhanced by linking the peptide to a sequence which contains at least one epitope that is capable of inducing a T helper cell response. In some embodiments, CTL epitope/HTL epitope conjugates are linked by a spacer molecule. The spacer is typically comprised of relatively small, neutral molecules, such as amino acids or amino acid mimetics, which are substantially uncharged under physiological conditions. The spacers are typically selected from, e.g., Ala, Gly, or other neutral spacers of nonpolar amino acids or neutral polar amino acids. It will be understood that the optionally present spacer need not be comprised of the same residues and thus can be a hetero- or homo-oligomer. When present, the spacer will usually be at least one or two residues, more usually three to six residues. Alternatively, the CTL peptide can be linked to the T helper peptide without a spacer.

[0474] Although the CTL peptide epitope can be linked directly to the T helper peptide epitope, CTL epitope/HTL epitope conjugates can be linked by a spacer molecule. The spacer is typically comprised of relatively small, neutral molecules, such as amino acids or amino acid mimetics, which are substantially uncharged under physiological conditions. The spacers are typically selected from, e.g., Ala, Gly, or other neutral spacers of nonpolar amino acids or neutral polar amino acids. It will be understood that the optionally present spacer need not be comprised of the same residues and thus can be a hetero- or homo-oligomer. When present, the spacer will usually be at least one or two residues, more usually three to six residues. The CTL peptide epitope can be linked to the T helper peptide epitope either directly or via a spacer either at the amino or carboxy terminus of the CTL peptide. The amino terminus of either the immunogenic peptide or the T helper peptide can be acylated.

[0475] HTL peptide epitopes can also be modified to alter their biological properties. For example, peptides comprising HTL epitopes can contain D-amino acids to increase their resistance to proteases and thus extend their serum half-life. Also, the epitope peptides can be conjugated to other molecules such as lipids, proteins or sugars, or any other synthetic compounds, to increase their biological activity. For example, the T helper peptide can be conjugated to one or more palmitic acid chains at either the amino or carboxyl termini.

[0476] In certain embodiments, the T helper peptide is one that is recognized by T helper cells present in the majority of the population. This can be accomplished by selecting amino acid sequences that bind to many, most, or all of the HLA class II molecules. These are known as “loosely HLA-restricted” or “promiscuous” T helper sequences. Examples of amino acid sequences that are promiscuous include sequences from antigens such as tetanus toxoid at positions 830-843 (QYIKANSKFIGITE (SEQ ID NO: 886)), Plasmodium falciparum CS protein at positions 378-398 (DIEKKIAKMEKASSVFNVVNS (SEQ ID NO: 887)), and Streptococcus 18 kD protein at positions 116 (GAVDSILGGVATYGAA (SEQ ID NO: 888)). Other examples include peptides bearing a DR 1-4-7 supermotif, or either of the DR3 motifs.

[0477] Alternatively, it is possible to prepare synthetic peptides capable of stimulating T helper lymphocytes, in a loosely HLA-restricted fashion, using amino acid sequences not found in nature (see, e.g., PCT publication WO 95/07707). These synthetic compounds called Pan-DR-binding epitopes (e.g., PADRE, Epimmune, Inc., San Diego, Calif.) are designed to bind most HLA-DR (human HLA class II) molecules. For instance, a pan-DR-binding epitope peptide having the formula: aKXVWANTLKAAa (SEQ ID NO: 889), where “X” is either cyclohexylalanine, phenylalanine, or tyrosine, and a is either D-alanine or L-alanine, has been found to bind to most HLA-DR alleles, and to stimulate the response of T helper lymphocytes from most individuals, regardless of their HLA type. An alternative of a pan-DR binding epitope comprises all “L” natural amino acids and can be provided in the form of nucleic acids that encode the epitope.

[0478] In some embodiments it can be desirable to include in a neoantigen therapeutic (e.g., peptides, polynucleotides, TCR, CAR, cells containing TCR or CAR, dendritic cell containing polypeptide, dendritic cell containing polynucleotide, antibody, etc.) in pharmaceutical compositions (e.g., immunogenic compositions) at least one component of which primes cytotoxic T lymphocytes. Lipids have been identified as agents capable of priming CTL in vivo against viral antigens. For example, palmitic acid residues can be attached to the ε- and α-amino groups of a lysine residue and then linked, e.g., via one or more linking residues such as Gly, Gly-Gly-, Ser, Ser-Ser, or the like, to an immunogenic neoantigenic peptide. The lipidated peptide can then be administered either directly in a micelle or particle, incorporated into a liposome, or emulsified in an adjuvant. In some embodiments, a particularly effective immunogenic construct comprises palmitic acid attached to ε- and α-amino groups of Lys, which is attached via linkage, e.g., Ser-Ser, to the amino terminus of the immunogenic peptide.

[0479] As another example of lipid priming of CTL responses, E. coli lipoproteins, such as tripalmitoyl-S-glycerylcysteinlyseryl-serine (P3CSS) can be used to prime virus specific CTL when covalently attached to an appropriate peptide. (See, e.g., Deres, et al., Nature 342:561, 1989). Neoantigenic peptides described herein can be coupled to P3CSS, for example, and the lipopeptide administered to an individual to specifically prime a CTL response to the target antigen. Moreover, because the induction of neutralizing antibodies can also be primed with P3CSS-conjugated epitopes, two such compositions can be combined to more effectively elicit both humoral and cell-mediated responses to infection.

[0480] As noted herein, additional amino acids can be added to the termini of a neoantigenic peptide to provide for ease of linking peptides one to another, for coupling to a carrier support or larger peptide, for modifying the physical or chemical properties of the peptide or oligopeptide, or the like. Amino acids such as tyrosine, cysteine, lysine, glutamic or aspartic acid, or the like, can be introduced at the C- or N-terminus of the peptide or oligopeptide. However, it is to be noted that modification at the carboxyl terminus of a T cell epitope can, in some cases, alter binding characteristics of the peptide. In addition, the peptide or oligopeptide sequences can differ from the natural sequence by being modified by terminal-NH2 acylation, e.g., by alkanoyl (C1-C20) or thioglycolyl acetylation, terminal-carboxyl amidation, e.g., ammonia, methylamine, etc. In some instances these modifications can provide sites for linking to a support or other molecule.

[0481] An embodiment of an immunogenic composition described herein comprises ex vivo administration of a cocktail of epitope-bearing neoantigenic polypeptide or polynucleotides to PBMC, or isolated DC therefrom, from the patient's blood. A pharmaceutical to facilitate harvesting of dendritic cells (DCs) can be used, including GM-CSF, IL-4, IL-6, IL-β, and TNFα. After pulsing the DCs with peptides or polynucleotides encoding the peptides, and prior to reinfusion into patients, the DC are washed to remove unbound peptides. In this embodiment, a vaccine or immunogenic composition comprises peptide-pulsed DCs which present the pulsed peptide epitopes complexed with HLA molecules on their surfaces. The composition is then administered to the patient. In other embodiments, such pulsed DCs are used to stimulate T cells suitable for use in T cell therapy.

### V. Multi-Epitope Immunogenic Compositions

[0482] A number of different approaches are available which allow simultaneous delivery of multiple epitopes. Nucleic acids encoding the neoantigenic peptides described herein are a particularly useful embodiment of the invention. In some embodiments, the nucleic acid is RNA. In some embodiments, minigene constructs encoding a neoantigenic peptide comprising one or multiple epitopes described herein are used to administer nucleic acids encoding the neoantigenic peptides described herein uses.

[0483] The use of multi-epitope minigenes is described An, L. and Whitton, J. L., J. Virol. 71:2292, 1997; Thomson, S. A. et al., J. Immunol. 157:822, 1996; Whitton, J. L. et al., J. Virol. 67:348, 1993; Hanke, R. et al., Vaccine 16:426, 1998. For example, a multi-epitope DNA plasmid encoding supermotif- and/or motif-bearing neoantigen peptides, a universal helper T cell epitope (or multiple tumor associated antigen HTL epitopes), and an endoplasmic reticulum-translocating signal sequence can be engineered.

[0484] The immunogenicity of a multi-epitopic minigene can be tested in transgenic mice to evaluate the magnitude of immune response induced against the epitopes tested. Further, the immunogenicity of DNA-encoded epitopes in vivo can be correlated with the in vitro responses of specific CTL lines against target cells transfected with the DNA plasmid. Thus, these experiments can show that the minigene serves to both: 1) generate a cell mediated and/or humoral response and 2) that the induced immune cells recognized cells expressing the encoded epitopes.

[0485] For example, to create a DNA sequence encoding the selected neoepitopes (minigene) for expression in human cells, the amino acid sequences of the epitopes can be reverse translated. A human codon usage table can be used to guide the codon choice for each amino acid. These neoepitope-encoding DNA sequences can be directly adjoined, so that when translated, a continuous polypeptide sequence is created. To optimize expression and/or immunogenicity, additional elements can be incorporated into the minigene design. Examples of amino acid sequences that can be reverse translated and included in the minigene sequence include: HLA class I epitopes, HLA class II epitopes, a ubiquitination signal sequence, and/or an endoplasmic reticulum targeting signal. In addition, HLA presentation of CTL and HTL epitopes can be improved by including synthetic (e.g. poly-alanine) or naturally-occurring flanking sequences adjacent to the CTL or HTL epitopes; these larger peptides comprising the epitope(s) are within the scope of the invention.

[0486] The minigene sequence can be converted to DNA by assembling oligonucleotides that encode the plus and minus strands of the minigene. Overlapping oligonucleotides (30-100 bases long) can be synthesized, phosphorylated, purified and annealed under appropriate conditions using well known techniques. The ends of the oligonucleotides can be joined, for example, using T4 DNA ligase. This synthetic minigene, encoding the epitope polypeptide, can then be cloned into a desired expression vector.

[0487] Standard regulatory sequences well known to those of skill in the art can be included in the vector to ensure expression in the target cells. For example, a promoter with a down-stream cloning site for minigene insertion; a polyadenylation signal for efficient transcription termination; an E. coli origin of replication; and an E. coli selectable marker (e.g. ampicillin or kanamycin resistance). Numerous promoters can be used for this purpose, e.g., the human cytomegalovirus (hCMV) promoter. See, e.g., U.S. Pat. Nos. 5,580,859 and 5,589,466 for other suitable promoter sequences.

[0488] Additional vector modifications can be used to optimize minigene expression and immunogenicity. In some cases, introns are required for efficient gene expression, and one or more synthetic or naturally-occurring introns could be incorporated into the transcribed region of the minigene. The inclusion of mRNA stabilization sequences and sequences for replication in mammalian cells can also be considered for increasing minigene expression.

[0489] Once an expression vector is selected, the minigene can be cloned into the polylinker region downstream of the promoter. This plasmid is transformed into an appropriate E. coli strain, and DNA is prepared using standard techniques. The orientation and DNA sequence of the minigene, as well as all other elements included in the vector, can be confirmed using restriction mapping and DNA sequence analysis. Bacterial cells harboring the correct plasmid can be stored as a master cell bank and a working cell bank.

[0490] In addition, immunomodulatory sequences appear to play a role in the immunogenicity of DNA vaccines. These sequences can be included in the vector, outside the minigene coding sequence, if desired to enhance immunogenicity. In some embodiments, the sequences are immunostimulatory. In another embodiment, the sequences are ISSs or CpGs.

[0491] In some embodiments, a bi-cistronic expression vector which allows production of both the minigene-encoded epitopes and a second protein (included to enhance or decrease immunogenicity) can be used. Examples of proteins or polypeptides that could beneficially enhance the immune response if co-expressed include cytokines (e.g., IL-2, IL-12, GM-CSF), cytokine-inducing molecules (e.g., LeIF), costimulatory molecules, or for HTL responses, pan-DR binding proteins. Helper (HTL) epitopes can be joined to intracellular targeting signals and expressed separately from expressed CTL epitopes; this allows direction of the HTL epitopes to a cell compartment different than that of the CTL epitopes. If required, this could facilitate more efficient entry of HTL epitopes into the HLA class II pathway, thereby improving HTL induction. In contrast to HTL or CTL induction, specifically decreasing the immune response by co-expression of immunosuppressive molecules (e.g. TGF-β) can be beneficial in certain diseases.

[0492] Therapeutic quantities of plasmid DNA can be produced for example, by fermentation in E. coli, followed by purification. Aliquots from the working cell bank are used to inoculate growth medium, and grown to saturation in shaker flasks or a bioreactor according to well-known techniques. Plasmid DNA can be purified using standard bioseparation technologies such as solid phase anion-exchange resins supplied by QIAGEN, Inc. (Valencia, Calif.). If required, supercoiled DNA can be isolated from the open circular and linear forms using gel electrophoresis or other methods.

[0493] Purified plasmid DNA can be prepared for injection using a variety of formulations. The simplest of these is reconstitution of lyophilized DNA in sterile phosphate-buffer saline (PBS). This approach, known as “naked DNA,” is currently being used for intramuscular (IM) administration in clinical trials. To maximize the immunotherapeutic effects of minigene DNA vaccines, an alternative method for formulating purified plasmid DNA can be used. A variety of methods have been described, and new techniques can become available. Cationic lipids can also be used in the formulation (see, e.g., as described by WO 93/24640; Mannino & Gould-Fogerite, BioTechniques 6(7): 682 (1988); U.S. Pat. No. 5,279,833; WO 91/06309; and Felgner, et al., Proc. Nat'l Acad. Sci. USA 84:7413 (1987). In addition, glycolipids, fusogenic liposomes, peptides and compounds referred to collectively as protective, interactive, non-condensing compounds (PINC) could also be complexed to purified plasmid DNA to influence variables such as stability, intramuscular dispersion, or trafficking to specific organs or cell types.

[0494] In another embodiment, the nucleic acid is introduced into cells by use of high-speed cell deformation. During high-speed deformation, cells are squeezed such that temporary disruptions occur in the cell membrane, thus allowing the nucleic acid to enter the cell. Alternatively, protein can be produced from expression vectors—in a bacterial expression vector, for example, and the proteins can then be delivered to the cell.

[0495] Target cell sensitization can be used as a functional assay for expression and HLA class I presentation of minigene-encoded CTL epitopes. For example, the plasmid DNA is introduced into a mammalian cell line that is suitable as a target for standard CTL chromium release assays. The transfection method used will be dependent on the final formulation. Electroporation can be used for “naked” DNA, whereas cationic lipids allow direct in vitro transfection. A plasmid expressing green fluorescent protein (GFP) can be co-transfected to allow enrichment of transfected cells using fluorescence activated cell sorting (FACS). These cells are then chromium-51 (⁵¹Cr) labeled and used as target cells for epitope-specific CTL lines; cytolysis, detected by ⁵¹Cr release, indicates both production of, and HLA presentation of, minigene-encoded CTL epitopes. Expression of HTL epitopes can be evaluated in an analogous manner using assays to assess HTL activity.

[0496] In vivo immunogenicity is a second approach for functional testing of minigene DNA formulations. Transgenic mice expressing appropriate human HLA proteins are immunized with the DNA product. The dose and route of administration are formulation dependent (e.g., IM for DNA in PBS, intraperitoneal (IP) for lipid-complexed DNA). An exemplary protocol is twenty-one days after immunization, splenocytes are harvested and restimulated for 1 week in the presence of peptides encoding each epitope being tested. Thereafter, for CTL effector cells, assays are conducted for cytolysis of peptide-loaded, ⁵¹Cr-labeled target cells using standard techniques. Lysis of target cells that were sensitized by HLA loaded with peptide epitopes, corresponding to minigene-encoded epitopes, demonstrates DNA vaccine function for in vivo induction of CTLs. Immunogenicity of HTL epitopes is evaluated in transgenic mice in an analogous manner.

[0497] Alternatively, the nucleic acids can be administered using ballistic delivery as described, for instance, in U.S. Pat. No. 5,204,253. Using this technique, particles comprised solely of DNA are administered. In a further alternative embodiment, DNA can be adhered to particles, such as gold particles.

### VI. Cells for Use in the Invention

[0498] In one aspect, the present invention also provides cells expressing a neoantigen-recognizing receptor that activates an immunoresponsive cell (e.g., T cell receptor (TCR) or chimeric antigen receptor (CAR)), and methods of using such cells for the treatment of a disease that requires an enhanced immune response.

[0499] Such cells include genetically modified immunoresponsive cells (e.g., T cells, Natural Killer (NK) cells, cytotoxic T lymphocytes (CTL) cells, helper T lymphocyte (HTL) cells) expressing an antigen-recognizing receptor (e.g., TCR or CAR) that binds one of the neoantigenic peptides described herein, and methods of use therefore for the treatment of neoplasia and other pathologies where an increase in an antigen-specific immune response is desired. T cell activation is mediated by a TCR or a CAR targeted to an antigen.

[0500] The present invention provides cells expressing a combination of an antigen-recognizing receptor that activates an immunoresponsive cell (e.g., TCR, CAR) and a chimeric co-stimulating receptor (CCR), and methods of using such cells for the treatment of a disease that requires an enhanced immune response. In some embodiments, tumor antigen-specific T cells, NK cells, CTL cells or other immunoresponsive cells are used as shuttles for the selective enrichment of one or more co-stimulatory ligands for the treatment or prevention of neoplasia. Such cells are administered to a human subject in need thereof for the treatment or prevention of a particular cancer.

[0501] In some embodiments, the tumor antigen-specific human lymphocytes that can be used in the methods of the invention include, without limitation, peripheral donor lymphocytes genetically modified to express chimeric antigen receptors (CARs) (Sadelain, M., et al. 2003 Nat Rev Cancer 3:35-45), peripheral donor lymphocytes genetically modified to express a full-length tumor antigen-recognizing T cell receptor complex comprising the a and p heterodimer (Morgan, R. A., et al. 2006 Science 314:126-129), lymphocyte cultures derived from tumor infiltrating lymphocytes (TILs) in tumor biopsies (Panelli, M. C., et al. 2000 J Immunol 164:495-504; Panelli, M. C., et al. 2000 J Immunol 164:4382-4392), and selectively in vitro-expanded antigen-specific peripheral bloodleukocytes employing artificial antigen-presenting cells (AAPCs) or pulsed dendritic cells (Dupont, J., et al. 2005 Cancer Res 65:5417-5427; Papanicolaou, G. A., et al. 2003 Blood 102:2498-2505). The T cells may be autologous, allogeneic, or derived in vitro from engineered progenitor or stem cells.

[0502] In some embodiments, the immunotherapeutic is an engineered receptor. In some embodiments, the engineered receptor is a chimeric antigen receptor (CAR), a T cell receptor (TCR), or a B-cell receptor (BCR), an adoptive T cell therapy (ACT), or a derivative thereof. In other aspects, the engineered receptor is a chimeric antigen receptor (CAR). In some aspects, the CAR is a first generation CAR. In other aspects, the CAR is a second generation CAR. In still other aspects, the CAR is a third generation CAR.

[0503] In some aspects, the CAR comprises an extracellular portion, a transmembrane portion, and an intracellular portion. In some aspects, the intracellular portion comprises at least one T cell co-stimulatory domain. In some aspects, the T cell co-stimulatory domain is selected from the group consisting of CD27, CD28, TNFRS9 (4-1BB), TNFRSF4 (OX40), TNFRSF8 (CD30), CD40LG (CD40L), ICOS, ITGB2 (LFA-1), CD2, CD7, KLRC2 (NKG2C), TNFRS18 (GITR), TNFRSF14 (HVEM), or any combination thereof.

[0504] In some aspects, the engineered receptor binds a target. In some aspects, the binding is specific to a peptide specific to one or more subjects suffering from a disease or condition.

[0505] In some aspects, the immunotherapeutic is a cell as described in detail herein. In some aspects, the immunotherapeutic is a cell comprising a receptor that specifically binds a peptide. In some aspects, the immunotherapeutic is a cell used in combination with the peptides/nucleic acids of this invention. In some embodiments, the cell is a patient cell. In some embodiments, the cell is a T cell. In some embodiments, the cell is tumor infiltrating lymphocyte.

[0506] In some aspects, a subject with a condition or disease is treated based on a T cell receptor repertoire of the subject. In some embodiments, an antigen vaccine is selected based on a T cell receptor repertoire of the subject. In some embodiments, a subject is treated with T cells expressing TCRs specific to an antigen or peptide. In some embodiments, a subject is treated with an antigen or peptide specific to TCRs, e.g., subject specific TCRs. In some embodiments, a subject is treated with an antigen or peptide specific to T cells expressing TCRs, e.g., subject specific TCRs. In some embodiments, a subject is treated with an antigen or peptide specific to subject specific TCRs.

[0507] In some embodiments, an immunogenic antigen composition or vaccine is selected based on TCRs identified in one or more subjects. In some embodiments identification of a T cell repertoire and testing in functional assays is used to determine an immunogenic composition or vaccine to be administered to one or more subjects with a condition or disease. In some embodiments, the immunogenic composition is an antigen vaccine. In some embodiments, the antigen vaccine comprises subject specific antigen peptides. In some embodiments, antigen peptides to be included in an antigen vaccine are selected based on a quantification of subject specific TCRs that bind to the antigens. In some embodiments, antigen peptides are selected based on a binding affinity of the peptide to a TCR. In some embodiments, the selecting is based on a combination of both the quantity and the binding affinity. For example, a TCR that binds strongly to an antigen in a functional assay, but that is not highly represented in a TCR repertoire may be a good candidate for an antigen vaccine because T cells expressing the TCR would be advantageously amplified.

[0508] In some embodiments, antigens are selected for administering to one or more subjects based on binding to TCRs. In some embodiments, T cells, such as T cells from a subject with a disease or condition, can be expanded. Expanded T cells that express TCRs specific to an immunogenic antigen peptide, can be administered back to a subject. In some embodiments, suitable cells, e.g., PBMCs, are transduced or transfected with polynucleotides for expression of TCRs specific to an immunogenic antigen peptide and administered to a subject. T cells expressing TCRs specific to an immunogenic antigen peptide can be expanded and administered back to a subject. In some embodiments, T cells that express TCRs specific to an immunogenic antigen peptide that result in cytolytic activity when incubated with autologous diseased tissue can be expanded and administered to a subject. In some embodiments, T cells used in functional assays result in binding to an immunogenic antigen peptide can be expanded and administered to a subject. In some embodiments, TCRs that have been determined to bind to subject specific immunogenic antigen peptides can be expressed in T cells and administered to a subject.

### Co-Stimulatory Ligands

[0509] In some embodiments, the cells of the invention are provided with at least one co-stimulatory ligand which is a non-antigen specific signal important for full activation of an immune cell. Co-stimulatory ligands include, without limitation, tumor necrosis factor (TNF) ligands, cytokines (such as IL-2, IL-12, IL-15 or IL21), and immunoglobulin (Ig) superfamily ligands.

[0510] Tumor necrosis factor (TNF) is a cytokine involved in systemic inflammation and stimulates the acute phase reaction. Its primary role is in the regulation of immune cells. Tumor necrosis factor (TNF) ligands share a number of common features. The majority of the ligands are synthesized as type II transmembrane proteins containing a short cytoplasmic segment and a relatively long extracellular region. TNF ligands include, without limitation, nerve growth factor (NGF), CD40L (CD40L)/CD154, CD137L/4-1BBL, tumor necrosis factor alpha (TNFα), CD134L/OX40L/CD252, CD27L/CD70, Fas ligand (FasL), CD3OL/CD153, tumor necrosis factor β (TNF(3)/lymphotoxin-alpha (LTa), lymphotoxin-beta (ur(3), CD257/B cell-activating factor (BAFF)/Blys/THANK/Ta11-1, glucocorticoid-induced TNF Receptor ligand (GITRL), and TNF-related apoptosis-inducing ligand (TRAIL), LIGHT (TNFSF14). The immunoglobulin (Ig) superfamily is a large group of cell surface and soluble proteins that are involved in the recognition, binding, or adhesion processes of cells. These proteins share structural features with immunoglobulins-they possess an immunoglobulin domain (fold). Immunoglobulin superfamily ligands include, without limitation, CD80 and CD86, both ligands for CD28.

[0511] Compositions comprising genetically modified immunoresponsive cells of the invention can be provided systemically or directly to a subject for the treatment of a neoplasia. In some embodiments, cells of the invention are directly injected into an organ of interest (e.g., an organ affected by a tumor). Alternatively, compositions comprising genetically modified immunoresponsive cells are provided indirectly to the organ of interest, for example, by administration into the circulatory system (e.g., the tumor vasculature). Expansion and differentiation agents can be provided prior to, during or after administration of the cells to increase production of T cells, NK cells, or CTL cells in vitro or in vivo.

[0512] The modified cells can be administered in any physiologically acceptable vehicle, normally intravascularly, although they may also be introduced into bone or other convenient site where the cells may find an appropriate site for regeneration and differentiation (e.g., thymus). Genetically modified immunoresponsive cells of the invention can comprise a purified population of cells. Those skilled in the art can readily determine the percentage of genetically modified immunoresponsive cells in a population using various well-known methods, such as fluorescence activated cell sorting (FACS). Dosages can be readily adjusted by those skilled in the art (e.g., a decrease in purity may require an increase in dosage). The cells can be introduced by injection, catheter, or the like. If desired, factors can also be included, including, but not limited to, interleukins, e.g. IL-2, IL-3, IL-6, and IL-11, as well as the other interleukins, the colony stimulating factors, such as G-, M- and GM-CSF, interferons, e.g. γ-interferon and erythropoietin.

[0513] Compositions of the invention include pharmaceutical compositions comprising genetically modified immunoresponsive cells or their progenitors and a pharmaceutically acceptable carrier. Administration can be autologous or heterologous. For example, immunoresponsive cells, or progenitors can be obtained from one subject, and administered to the same subject or a different, compatible subject. Peripheral blood derived immunoresponsive cells of the invention or their progeny (e.g., in vivo, ex vivo or in vitro derived) can be administered via localized injection, including catheter administration, systemic injection, localized injection, intravenous injection, or parenteral administration. When administering a therapeutic composition of the present invention (e.g., a pharmaceutical composition containing a genetically modified immunoresponsive cell), it will generally be formulated in a unit dosage injectable form (solution, suspension, emulsion).

### VII. Methods of Use and Pharmaceutical Compositions

[0514] The neoantigen therapeutics (e.g., peptides, polynucleotides, TCR, CAR, cells containing TCR or CAR, dendritic cell containing polypeptide, dendritic cell containing polynucleotide, antibody, etc.) described herein are useful in a variety of applications including, but not limited to, therapeutic treatment methods, such as the treatment of cancer. In some embodiments, the therapeutic treatment methods comprise immunotherapy. In certain embodiments, a neoantigen peptide is useful for activating, promoting, increasing, and/or enhancing an immune response, redirecting an existing immune response to a new target, increasing the immunogenicity of a tumor, inhibiting tumor growth, reducing tumor volume, increasing tumor cell apoptosis, and/or reducing the tumorigenicity of a tumor. The methods of use can be in vitro, ex vivo, or in vivo methods.

[0515] In some aspects, the present invention provides methods for activating an immune response in a subject using a neoantigen therapeutic described herein. In some embodiments, the invention provides methods for promoting an immune response in a subject using a neoantigen therapeutic described herein. In some embodiments, the invention provides methods for increasing an immune response in a subject using a neoantigen peptide described herein. In some embodiments, the invention provides methods for enhancing an immune response using a neoantigen peptide. In some embodiments, the activating, promoting, increasing, and/or enhancing of an immune response comprises increasing cell-mediated immunity. In some embodiments, the activating, promoting, increasing, and/or enhancing of an immune response comprises increasing T cell activity or humoral immunity. In some embodiments, the activating, promoting, increasing, and/or enhancing of an immune response comprises increasing CTL or HTL activity. In some embodiments, the activating, promoting, increasing, and/or enhancing of an immune response comprises increasing NK cell activity. In some embodiments, the activating, promoting, increasing, and/or enhancing of an immune response comprises increasing T cell activity and increasing NK cell activity. In some embodiments, the activating, promoting, increasing, and/or enhancing of an immune response comprises increasing CTL activity and increasing NK cell activity. In some embodiments, the activating, promoting, increasing, and/or enhancing of an immune response comprises inhibiting or decreasing the suppressive activity of Tregs. In some embodiments, the immune response is a result of antigenic stimulation. In some embodiments, the antigenic stimulation is a tumor cell. In some embodiments, the antigenic stimulation is cancer.

[0516] In some embodiments, the invention provides methods of activating, promoting, increasing, and/or enhancing of an immune response using a neoantigen therapeutic described herein. In some embodiments, a method comprises administering to a subject in need thereof a therapeutically effective amount of a neoantigen therapeutic that delivers a neoantigen polypeptide or polynucleotide to a tumor cell. In some embodiments, a method comprises administering to a subject in need thereof a therapeutically effective amount of a neoantigen therapeutic that binds the tumor associated antigen and is internalized by the tumor cell. In some embodiments, a method comprises administering to a subject in need thereof a therapeutically effective amount of a neoantigen polypeptide that is internalized by a tumor cell, and the neoantigen peptide is processed by the cell. In some embodiments, a method comprises administering to a subject in need thereof a therapeutically effective amount of a neoantigen polypeptide that is internalized by a tumor cell, and an antigenic peptide is presented on the surface of the tumor cell. In some embodiments, a method comprises administering to a subject in need thereof a therapeutically effective amount of a neoantigen polypeptide that is internalized by the tumor cell, is processed by the cell, and an antigenic peptide is presented on the surface of the tumor cell.

[0517] In some embodiments, a method comprises administering to a subject in need thereof a therapeutically effective amount of a neoantigen polypeptide or polynucleotide described herein that delivers an exogenous polypeptide comprising at least one antigenic peptide to a tumor cell, wherein the antigenic peptide is presented on the surface of the tumor cell. In some embodiments, the antigenic peptide is presented on the surface of the tumor cell in complex with a MHC class I molecule. In some embodiments, the antigenic peptide is presented on the surface of the tumor cell in complex with a MHC class II molecule.

[0518] In some embodiments, a method comprises contacting a tumor cell with a neoantigen polypeptide or polynucleotide described herein that delivers an exogenous polypeptide comprising at least one antigenic peptide to the tumor cell, wherein the antigenic peptide is presented on the surface of the tumor cell. In some embodiments, the antigenic peptide is presented on the surface of the tumor cell in complex with a MHC class I molecule. In some embodiments, the antigenic peptide is presented on the surface of the tumor cell in complex with a MHC class II molecule.

[0519] In some embodiments, a method comprises administering to a subject in need thereof a therapeutically effective amount of a neoantigen polypeptide or polynucleotide described herein that delivers an exogenous polypeptide comprising at least one antigenic peptide to a tumor cell, wherein the antigenic peptide is presented on the surface of the tumor cell, and an immune response against the tumor cell is induced. In some embodiments, the immune response against the tumor cell is increased. In some embodiments, the neoantigen polypeptide or polynucleotide delivers an exogenous polypeptide comprising at least one antigenic peptide to a tumor cell, wherein the antigenic peptide is presented on the surface of the tumor cell, and tumor growth is inhibited.

[0520] In some embodiments, a method comprises administering to a subject in need thereof a therapeutically effective amount of a neoantigen polypeptide or polynucleotide described herein that delivers an exogenous polypeptide comprising at least one antigenic peptide to a tumor cell, wherein the antigenic peptide is presented on the surface of the tumor cell, and T cell killing directed against the tumor cell is induced. In some embodiments, T cell killing directed against the tumor cell is enhanced. In some embodiments, T cell killing directed against the tumor cell is increased.

[0521] In some embodiments, a method of increasing an immune response in a subject comprises administering to the subject a therapeutically effective amount of a neoantigen therapeutic described herein, wherein the agent is an antibody that specifically binds the neoantigen described herein. In some embodiments, a method of increasing an immune response in a subject comprises administering to the subject a therapeutically effective amount of the antibody.

[0522] The present invention provides methods of redirecting an existing immune response to a tumor. In some embodiments, a method of redirecting an existing immune response to a tumor comprises administering to a subject a therapeutically effective amount of a neoantigen therapeutic described herein. In some embodiments, the existing immune response is against a virus. In some embodiments, the virus is selected from the group consisting of: measles virus, varicella-zoster virus (VZV; chickenpox virus), influenza virus, mumps virus, poliovirus, rubella virus, rotavirus, hepatitis A virus (HAV), hepatitis B virus (HBV), Epstein Barr virus (EBV), and cytomegalovirus (CMV). In some embodiments, the virus is varicella-zoster virus. In some embodiments, the virus is cytomegalovirus. In some embodiments, the virus is measles virus. In some embodiments, the existing immune response has been acquired after a natural viral infection. In some embodiments, the existing immune response has been acquired after vaccination against a virus. In some embodiments, the existing immune response is a cell-mediated response. In some embodiments, the existing immune response comprises cytotoxic T cells (CTLs) or HTLs.

[0523] In some embodiments, a method of redirecting an existing immune response to a tumor in a subject comprises administering a fusion protein comprising (i) an antibody that specifically binds a neoantigen and (ii) at least one neoantigenic peptide described herein, wherein (a) the fusion protein is internalized by a tumor cell after binding to the tumor-associated antigen; (b) the neoantigenic peptide is processed and presented on the surface of the tumor cell associated with a MHC class I molecule; and (c) the neoantigenic peptide/MHC Class I complex is recognized by cytotoxic T cells. In some embodiments, the cytotoxic T cells are memory T cells. In some embodiments, the memory T cells are the result of a vaccination with the neoantigenic peptide.

[0524] The present invention provides methods of increasing the immunogenicity of a tumor. In some embodiments, a method of increasing the immunogenicity of a tumor comprises contacting a tumor or tumor cells with an effective amount of a neoantigen therapeutic described herein. In some embodiments, a method of increasing the immunogenicity of a tumor comprises administering to a subject a therapeutically effective amount of a neoantigen therapeutic described herein.

[0525] The present invention also provides methods for inhibiting growth of a tumor using a neoantigen therapeutic described herein. In certain embodiments, a method of inhibiting growth of a tumor comprises contacting a cell mixture with a neoantigen therapeutic in vitro. For example, an immortalized cell line or a cancer cell line mixed with immune cells (e.g., T cells) is cultured in medium to which a neoantigenic peptide is added. In some embodiments, tumor cells are isolated from a patient sample, for example, a tissue biopsy, pleural effusion, or blood sample, mixed with immune cells (e.g., T cells), and cultured in medium to which a neoantigen therapeutic is added. In some embodiments, a neoantigen therapeutic increases, promotes, and/or enhances the activity of the immune cells. In some embodiments, a neoantigen therapeutic inhibits tumor cell growth. In some embodiments, a neoantigen therapeutic activates killing of the tumor cells.

[0526] In certain embodiments, the subject is a human. In certain embodiments, the subject has a tumor or the subject had a tumor which was at least partially removed.

[0527] In some embodiments, a method of inhibiting growth of a tumor comprises redirecting an existing immune response to a new target, comprising administering to a subject a therapeutically effective amount of a neoantigen therapeutic, wherein the existing immune response is against an antigenic peptide delivered to the tumor cell by the neoantigenic peptide.

[0528] In certain embodiments, the tumor comprises cancer stem cells. In certain embodiments, the frequency of cancer stem cells in the tumor is reduced by administration of the neoantigen therapeutic. In some embodiments, a method of reducing the frequency of cancer stem cells in a tumor in a subject, comprising administering to the subject a therapeutically effective amount of a neoantigen therapeutic is provided.

[0529] In addition, in some aspects the invention provides a method of reducing the tumorigenicity of a tumor in a subject, comprising administering to the subject a therapeutically effective amount of a neoantigen therapeutic described herein. In certain embodiments, the tumor comprises cancer stem cells. In some embodiments, the tumorigenicity of a tumor is reduced by reducing the frequency of cancer stem cells in the tumor. In some embodiments, the methods comprise using the neoantigen therapeutic described herein. In certain embodiments, the frequency of cancer stem cells in the tumor is reduced by administration of a neoantigen therapeutic described herein.

[0530] In some embodiments, the tumor is a solid tumor. In certain embodiments, the tumor is a tumor selected from the group consisting of: colorectal tumor, pancreatic tumor, lung tumor, ovarian tumor, liver tumor, breast tumor, kidney tumor, prostate tumor, neuroendocrine tumor, gastrointestinal tumor, melanoma, cervical tumor, bladder tumor, glioblastoma, and head and neck tumor. In certain embodiments, the tumor is a colorectal tumor. In certain embodiments, the tumor is an ovarian tumor. In some embodiments, the tumor is a breast tumor. In some embodiments, the tumor is a lung tumor. In certain embodiments, the tumor is a pancreatic tumor. In certain embodiments, the tumor is a melanoma tumor. In some embodiments, the tumor is a solid tumor.

[0531] The present invention further provides methods for treating cancer in a subject comprising administering to the subject a therapeutically effective amount of a neoantigen therapeutic described herein.

[0532] In some embodiments, a method of treating cancer comprises redirecting an existing immune response to a new target, the method comprising administering to a subject a therapeutically effective amount of neoantigen therapeutic, wherein the existing immune response is against an antigenic peptide delivered to the cancer cell by the neoantigenic peptide.

[0533] The present invention provides for methods of treating cancer comprising administering to a subject a therapeutically effective amount of a neoantigen therapeutic described herein (e.g., a subject in need of treatment). In certain embodiments, the subject is a human. In certain embodiments, the subject has a cancerous tumor. In certain embodiments, the subject has had a tumor at least partially removed.

[0534] In certain embodiments, the cancer is a cancer selected from the group consisting of colorectal cancer, pancreatic cancer, lung cancer, ovarian cancer, liver cancer, breast cancer, kidney cancer, prostate cancer, gastrointestinal cancer, melanoma, cervical cancer, neuroendocrine cancer, bladder cancer, glioblastoma, and head and neck cancer. In certain embodiments, the cancer is pancreatic cancer. In certain embodiments, the cancer is ovarian cancer. In certain embodiments, the cancer is colorectal cancer. In certain embodiments, the cancer is breast cancer. In certain embodiments, the cancer is prostate cancer. In certain embodiments, the cancer is lung cancer. In certain embodiments, the cancer is melanoma. In some embodiments, the cancer is a solid cancer. In some embodiments, the cancer comprises a solid tumor.

[0535] In some embodiments, the cancer is a hematologic cancer. In some embodiment, the cancer is selected from the group consisting of: acute myelogenous leukemia (AML), Hodgkin lymphoma, multiple myeloma, T cell acute lymphoblastic leukemia (T-ALL), chronic lymphocytic leukemia (CLL), hairy cell leukemia, chronic myelogenous leukemia (CML), non-Hodgkin lymphoma, diffuse large B-cell lymphoma (DLBCL), mantle cell lymphoma (MCL), and cutaneous T cell lymphoma (CTCL).

[0536] In some embodiments, the neoantigen therapeutic is administered as a combination therapy. Combination therapy with two or more therapeutic agents uses agents that work by different mechanisms of action, although this is not required. Combination therapy using agents with different mechanisms of action can result in additive or synergetic effects. Combination therapy can allow for a lower dose of each agent than is used in monotherapy, thereby reducing toxic side effects and/or increasing the therapeutic index of the agent(s). Combination therapy can decrease the likelihood that resistant cancer cells will develop. In some embodiments, combination therapy comprises a therapeutic agent that affects the immune response (e.g., enhances or activates the response) and a therapeutic agent that affects (e.g., inhibits or kills) the tumor/cancer cells.

[0537] Cancers include, but are not limited to, B cell cancer, e.g., multiple myeloma, Waldenstrom's macroglobulinemia, the heavy chain diseases, such as, for example, alpha chain disease, gamma chain disease, and mu chain disease, benign monoclonal gammopathy, and immunocytic amyloidosis, melanomas, breast cancer, lung cancer, bronchus cancer, colorectal cancer, prostate cancer (e.g., metastatic, hormone refractory prostate cancer), pancreatic cancer, stomach cancer, ovarian cancer, urinary bladder cancer, brain or central nervous system cancer, peripheral nervous system cancer, esophageal cancer, cervical cancer, uterine or endometrial cancer, cancer of the oral cavity or pharynx, liver cancer, kidney cancer, testicular cancer, biliary tract cancer, small bowel or appendix cancer, salivary gland cancer, thyroid gland cancer, adrenal gland cancer, osteosarcoma, chondrosarcoma, cancer of hematological tissues, and the like. Other non-limiting examples of types of cancers applicable to the methods encompassed by the present invention include human sarcomas and carcinomas, e.g., fibrosarcoma, myxosarcoma, liposarcoma, chondrosarcoma, osteogenic sarcoma, chordoma, angiosarcoma, endotheliosarcoma, lymphangiosarcoma, lymphangioendotheliosarcoma, synovioma, mesothelioma, Ewing's tumor, leiomyosarcoma, rhabdomyosarcoma, colon carcinoma, colorectal cancer, pancreatic cancer, breast cancer, ovarian cancer, squamous cell carcinoma, basal cell carcinoma, adenocarcinoma, sweat gland carcinoma, sebaceous gland carcinoma, papillary carcinoma, papillary adenocarcinomas, cystadenocarcinoma, medullary carcinoma, bronchogenic carcinoma, renal cell carcinoma, hepatoma, bile duct carcinoma, liver cancer, choriocarcinoma, seminoma, embryonal carcinoma, Wilms' tumor, cervical cancer, bone cancer, brain tumor, testicular cancer, lung carcinoma, small cell lung carcinoma, bladder carcinoma, epithelial carcinoma, glioma, astrocytoma, medulloblastoma, craniopharyngioma, ependymoma, pinealoma, hemangioblastoma, acoustic neuroma, oligodendroglioma, meningioma, melanoma, neuroblastoma, retinoblastoma; leukemias, e.g., acute lymphocytic leukemia and acute myelocytic leukemia (myeloblastic, promyelocytic, myelomonocytic, monocytic and erythroleukemia); chronic leukemia (chronic myelocytic (granulocytic) leukemia and chronic lymphocytic leukemia); and polycythemia vera, lymphoma (Hodgkin's disease and non-Hodgkin's disease), multiple myeloma, Waldenstrom's macroglobulinemia, and heavy chain disease. In some embodiments, the cancer whose phenotype is determined by the method of the invention is an epithelial cancer such as, but not limited to, bladder cancer, breast cancer, cervical cancer, colon cancer, gynecologic cancers, renal cancer, laryngeal cancer, lung cancer, oral cancer, head and neck cancer, ovarian cancer, pancreatic cancer, prostate cancer, or skin cancer. In other embodiments, the cancer is breast cancer, prostate cancer, lung cancer, or colon cancer. In still other embodiments, the epithelial cancer is non-small-cell lung cancer, nonpapillary renal cell carcinoma, cervical carcinoma, ovarian carcinoma (e.g., serous ovarian carcinoma), or breast carcinoma. The epithelial cancers may be characterized in various other ways including, but not limited to, serous, endometrioid, mucinous, clear cell, brenner, or undifferentiated. In some embodiments, the present invention is used in the treatment, diagnosis, and/or prognosis of lymphoma or its subtypes, including, but not limited to, mantle cell lymphoma. Lymphoproliferative disorders are also considered to be proliferative diseases.

[0538] In some embodiments, the combination of an agent described herein and at least one additional therapeutic agent results in additive or synergistic results. In some embodiments, the combination therapy results in an increase in the therapeutic index of the agent. In some embodiments, the combination therapy results in an increase in the therapeutic index of the additional therapeutic agent(s). In some embodiments, the combination therapy results in a decrease in the toxicity and/or side effects of the agent. In some embodiments, the combination therapy results in a decrease in the toxicity and/or side effects of the additional therapeutic agent(s).

[0539] In certain embodiments, in addition to administering a neoantigen therapeutic described herein, the method or treatment further comprises administering at least one additional therapeutic agent. An additional therapeutic agent can be administered prior to, concurrently with, and/or subsequently to, administration of the agent. In some embodiments, the at least one additional therapeutic agent comprises 1, 2, 3, or more additional therapeutic agents.

[0540] Therapeutic agents that can be administered in combination with the neoantigen therapeutic described herein include chemotherapeutic agents. Thus, in some embodiments, the method or treatment involves the administration of an agent described herein in combination with a chemotherapeutic agent or in combination with a cocktail of chemotherapeutic agents. Treatment with an agent can occur prior to, concurrently with, or subsequent to administration of chemotherapies. Combined administration can include co-administration, either in a single pharmaceutical formulation or using separate formulations, or consecutive administration in either order but generally within a time period such that all active agents can exert their biological activities simultaneously. Preparation and dosing schedules for such chemotherapeutic agents can be used according to manufacturers' instructions or as determined empirically by the skilled practitioner. Preparation and dosing schedules for such chemotherapy are also described in The Chemotherapy Source Book, 4th Edition, 2008, M. C. Perry, Editor, Lippincott, Williams & Wilkins, Philadelphia, Pa.

[0541] Useful classes of chemotherapeutic agents include, for example, anti-tubulin agents, auristatins, DNA minor groove binders, DNA replication inhibitors, alkylating agents (e.g., platinum complexes such as cisplatin, mono(platinum), bis(platinum) and tri-nuclear platinum complexes and carboplatin), anthracyclines, antibiotics, anti-folates, antimetabolites, chemotherapy sensitizers, duocarmycins, etoposides, fluorinated pyrimidines, ionophores, lexitropsins, nitrosoureas, platinols, purine antimetabolites, puromycins, radiation sensitizers, steroids, taxanes, topoisomerase inhibitors, vinca alkaloids, or the like. In certain embodiments, the second therapeutic agent is an alkylating agent, an antimetabolite, an antimitotic, a topoisomerase inhibitor, or an angiogenesis inhibitor.

[0542] Chemotherapeutic agents useful in the instant invention include, but are not limited to, alkylating agents such as thiotepa and cyclosphosphamide (CYTOXAN); alkyl sulfonates such as busulfan, improsulfan and piposulfan; aziridines such as benzodopa, carboquone, meturedopa, and uredopa; ethylenimines and methylamelamines including altretamine, triethylenemelamine, trietylenephosphoramide, triethylenethiophosphaoramide and trimethylolomelamime; nitrogen mustards such as chlorambucil, chlornaphazine, cholophosphamide, estramustine, ifosfamide, mechlorethamine, mechlorethamine oxide hydrochloride, melphalan, novembichin, phenesterine, prednimustine, trofosfamide, uracil mustard; nitrosureas such as carmustine, chlorozotocin, fotemustine, lomustine, nimustine, ranimustine; antibiotics such as aclacinomysins, actinomycin, authramycin, azaserine, bleomycins, cactinomycin, calicheamicin, carabicin, caminomycin, carzinophilin, chromomycins, dactinomycin, daunorubicin, detorubicin, 6-diazo-5-oxo-L-norleucine, doxorubicin, epirubicin, esorubicin, idarubicin, marcellomycin, mitomycins, mycophenolic acid, nogalamycin, olivomycins, peplomycin, potfiromycin, puromycin, quelamycin, rodorubicin, streptonigrin, streptozocin, tubercidin, ubenimex, zinostatin, zorubicin; anti-metabolites such as methotrexate and 5-fluorouracil (5-FU); folic acid analogues such as denopterin, methotrexate, pteropterin, trimetrexate; purine analogs such as fludarabine, 6-mercaptopurine, thiamiprine, thioguanine; pyrimidine analogs such as ancitabine, azacitidine, 6-azauridine, carmofur, cytosine arabinoside, dideoxyuridine, doxifluridine, enocitabine, floxuridine, 5-FU; androgens such as calusterone, dromostanolone propionate, epitiostanol, mepitiostane, testolactone; anti-adrenals such as aminoglutethimide, mitotane, trilostane; folic acid replenishers such as folinic acid; aceglatone; aldophosphamide glycoside; aminolevulinic acid; amsacrine; bestrabucil; bisantrene; edatraxate; defofamine; demecolcine; diaziquone; elformithine; elliptinium acetate; etoglucid; gallium nitrate; hydroxyurea; lentinan; lonidamine; mitoguazone; mitoxantrone; mopidamol; nitracrine; pentostatin; phenamet; pirarubicin; podophyllinic acid; 2-ethylhydrazide; procarbazine; PSK; razoxane; sizofuran; spirogermanium; tenuazonic acid; triaziquone; 2,2′,2″-trichlorotriethylamine; urethan; vindesine; dacarbazine; mannomustine; mitobronitol; mitolactol; pipobroman; gacytosine; arabinoside (Ara-C); taxoids, e.g. paclitaxel (TAXOL) and docetaxel (TAXOTERE); chlorambucil; gemcitabine; 6-thioguanine; mercaptopurine; platinum analogs such as cisplatin and carboplatin; vinblastine; platinum; etoposide (VP-16); ifosfamide; mitomycin C; mitoxantrone; vincristine; vinorelbine; navelbine; novantrone; teniposide; daunomycin; aminopterin; ibandronate; CPT11; topoisomerase inhibitor RFS 2000; difluoromethylornithine (DMFO); retinoic acid; esperamicins; capecitabine (XELODA); and pharmaceutically acceptable salts, acids or derivatives of any of the above. Chemotherapeutic agents also include anti-hormonal agents that act to regulate or inhibit hormone action on tumors such as anti-estrogens including for example tamoxifen, raloxifene, aromatase inhibiting 4(5)-imidazoles, 4 hydroxytamoxifen, trioxifene, keoxifene, LY 117018, onapristone, and toremifene (FARESTON); and anti-androgens such as flutamide, nilutamide, bicalutamide, leuprolide, and goserelin; and pharmaceutically acceptable salts, acids or derivatives of any of the above. In certain embodiments, the additional therapeutic agent is cisplatin. In certain embodiments, the additional therapeutic agent is carboplatin.

[0543] In certain embodiments, the chemotherapeutic agent is a topoisomerase inhibitor. Topoisomerase inhibitors are chemotherapy agents that interfere with the action of a topoisomerase enzyme (e.g., topoisomerase I or II). Topoisomerase inhibitors include, but are not limited to, doxorubicin HCl, daunorubicin citrate, mitoxantrone HCl, actinomycin D, etoposide, topotecan HCl, teniposide (VM-26), and irinotecan, as well as pharmaceutically acceptable salts, acids, or derivatives of any of these. In some embodiments, the additional therapeutic agent is irinotecan.

[0544] In certain embodiments, the chemotherapeutic agent is an anti-metabolite. An anti-metabolite is a chemical with a structure that is similar to a metabolite required for normal biochemical reactions, yet different enough to interfere with one or more normal functions of cells, such as cell division. Anti-metabolites include, but are not limited to, gemcitabine, fluorouracil, capecitabine, methotrexate sodium, ralitrexed, pemetrexed, tegafur, cytosine arabinoside, thioguanine, 5-azacytidine, 6 mercaptopurine, azathioprine, 6-thioguanine, pentostatin, fludarabine phosphate, and cladribine, as well as pharmaceutically acceptable salts, acids, or derivatives of any of these. In certain embodiments, the additional therapeutic agent is gemcitabine.

[0545] In certain embodiments, the chemotherapeutic agent is an antimitotic agent, including, but not limited to, agents that bind tubulin. In some embodiments, the agent is a taxane. In certain embodiments, the agent is paclitaxel or docetaxel, or a pharmaceutically acceptable salt, acid, or derivative of paclitaxel or docetaxel. In certain embodiments, the agent is paclitaxel (TAXOL), docetaxel (TAXOTERE), albumin-bound paclitaxel (ABRAXANE), DHA-paclitaxel, or PG-paclitaxel. In certain alternative embodiments, the antimitotic agent comprises a vinca alkaloid, such as vincristine, vinblastine, vinorelbine, or vindesine, or pharmaceutically acceptable salts, acids, or derivatives thereof. In some embodiments, the antimitotic agent is an inhibitor of kinesin Eg5 or an inhibitor of a mitotic kinase such as Aurora A or Plk1. In certain embodiments, the additional therapeutic agent is paclitaxel. In some embodiments, the additional therapeutic agent is albumin-bound paclitaxel.

[0546] In some embodiments, an additional therapeutic agent comprises an agent such as a small molecule. For example, treatment can involve the combined administration of an agent of the present invention with a small molecule that acts as an inhibitor against tumor-associated antigens including, but not limited to, EGFR, HER2 (ErbB2), and/or VEGF. In some embodiments, an agent of the present invention is administered in combination with a protein kinase inhibitor selected from the group consisting of: gefitinib (IRESSA), erlotinib (TARCEVA), sunitinib (SUTENT), lapatanib, vandetanib (ZACTIMA), AEE788, CI-1033, cediranib (RECENTIN), sorafenib (NEXAVAR), and pazopanib (GW786034B). In some embodiments, an additional therapeutic agent comprises an mTOR inhibitor. In another embodiment, the additional therapeutic agent is chemotherapy or other inhibitors that reduce the number of Treg cells. In certain embodiments, the therapeutic agent is cyclophosphamide or an anti-CTLA4 antibody. In another embodiment, the additional therapeutic reduces the presence of myeloid-derived suppressor cells. In a further embodiment, the additional therapeutic is carbotaxol. In another embodiment, the additional therapeutic agent shifts cells to a T helper 1 response. In a further embodiment, the additional therapeutic agent is ibrutinib.

[0547] In some embodiments, an additional therapeutic agent comprises a biological molecule, such as an antibody. For example, treatment can involve the combined administration of an agent of the present invention with antibodies against tumor-associated antigens including, but not limited to, antibodies that bind EGFR, HER2/ErbB2, and/or VEGF. In certain embodiments, the additional therapeutic agent is an antibody specific for a cancer stem cell marker. In certain embodiments, the additional therapeutic agent is an antibody that is an angiogenesis inhibitor (e.g., an anti-VEGF or VEGF receptor antibody). In certain embodiments, the additional therapeutic agent is bevacizumab (AVASTIN), ramucirumab, trastuzumab (HERCEPTIN), pertuzumab (OMNITARG), panitumumab (VECTIBIX), nimotuzumab, zalutumumab, or cetuximab (ERBITUX).

[0548] The agents and compositions provided herein may be used alone or in combination with conventional therapeutic regimens such as surgery, irradiation, chemotherapy and/or bone marrow transplantation (autologous, syngeneic, allogeneic or unrelated). A set of tumor antigens can be useful, e.g., in a large fraction of cancer patients.

[0549] In some embodiments, at least one or more chemotherapeutic agents may be administered in addition to the composition comprising an immunogenic vaccine. In some embodiments, the one or more chemotherapeutic agents may belong to different classes of chemotherapeutic agents.

[0550] Examples of chemotherapy agents include, but are not limited to, alkylating agents such as nitrogen mustards (e.g. mechlorethamine (nitrogen mustard), chlorambucil, cyclophosphamide (Cytoxan®), ifosfamide, and melphalan); nitrosoureas (e.g. N-Nitroso-N-methylurea, streptozocin, carmustine (BCNU), lomustine, and semustine); alkyl sulfonates (e.g. busulfan); tetrazines (e.g. dacarbazine (DTIC), mitozolomide and temozolomide (Temodar®)); aziridines (e.g. thiotepa, mytomycin and diaziquone); and platinum drugs (e.g. cisplatin, carboplatin, and oxaliplatin); non-classical alkylating agents such as procarbazine and altretamine (hexamethylmelamine); anti-metabolite agents such as 5-fluorouracil (5-FU), 6-mercaptopurine (6-MP), capecitabine (Xeloda®), cladribine, clofarabine, cytarabine (Ara-C®), decitabine, floxuridine, fludarabine, nelarabine, gemcitabine (Gemzar®), hydroxyurea, methotrexate, pemetrexed (Alimta®), pentostatin, thioguanine, Vidaza; anti-microtubule agents such as vinca alkaloids (e.g. vincristine, vinblastine, vinorelbine, vindesine and vinflunine); taxanes (e.g. paclitaxel (Taxol®), docetaxel (Taxotere®)); podophyllotoxin (e.g. etoposide and teniposide); epothilones (e.g. ixabepilone (Ixempra®)); estramustine (Emcyt®); anti-tumor antibiotics such as anthracyclines (e.g. daunorubicin, doxorubicin (Adriamycin®, epirubicin, idarubicin); actinomycin-D; and bleomycin; topoisomerase I inhibitors such as topotecan and irinotecan (CPT-11); topoisomerase II inhibitors such as etoposide (VP-16), teniposide, mitoxantrone, novobiocin, merbarone and aclarubicin; corticosteroids such as prednisone, methylprednisolone (Solumedrol®), and dexamethasone (Decadron®); L-asparaginase; bortezomib (Velcade®); immunotherapeutic agents such as rituximab (Rituxan®), alemtuzumab (Campath®), thalidomide, lenalidomide (Revlimid®), BCG, interleukin-2, interferon-alfa and cancer vaccines such as Provenge®; hormone therapeutic agents such as fulvestrant (Faslodex®), tamoxifen, toremifene (Fareston®), anastrozole (Arimidex®), exemestan (Aromasin®), letrozole (Femara®), megestrol acetate (Megace®), estrogens, bicalutamide (Casodex®), flutamide (Eulexin®), nilutamide (Nilandron®), leuprolide (Lupron®) and goserelin (Zoladex®); differentiating agents such as retinoids, tretinoin (ATRA or Atralin®), bexarotene (Targretin®) and arsenic trioxide (Arsenox®); and targeted therapeutic agents such as imatinib (Gleevec®), gefitinib (Iressa®) and sunitinib (Sutent®). In some embodiments, the chemotherapy is a cocktail therapy. Examples of a cocktail therapy includes, but is not limited to, CHOP/R-CHOP (rituxan, cyclophosphamide, hydroxydoxorubicin, vincristine, and prednisone), EPOCH (etoposide, prednisone, vincristine, cyclophosphamide, hydroxydoxorubicin), Hyper-CVAD (cyclophosphamide, vincristine, hydroxydoxorubicin, dexamethasone), FOLFOX (fluorouracil (5-FU), leucovorin, oxaliplatin), ICE (ifosfamide, carboplatin, etoposide), DHAP (high-dose cytarabine [ara-C], dexamethasone, cisplatin), ESHAP (etoposide, methylprednisolone, cytarabine [ara-C], cisplatin) and CMF (cyclophosphamide, methotrexate, fluouracil).

[0551] In certain embodiments, an additional therapeutic agent comprises a second immunotherapeutic agent. In some embodiments, the additional immunotherapeutic agent includes, but is not limited to, a colony stimulating factor, an interleukin, an antibody that blocks immunosuppressive functions (e.g., an anti-CTLA-4 antibody, anti-CD28 antibody, anti-CD3 antibody, anti-PD-1 antibody, anti-PD-L1 antibody, anti-TIGIT antibody), an antibody that enhances immune cell functions (e.g., an anti-GITR antibody, an anti-OX-40 antibody, an anti-CD40 antibody, or an anti-4-1BB antibody), a toll-like receptor (e.g., TLR4, TLR7, TLR9), a soluble ligand (e.g., GITRL, GITRL-Fc, OX-40L, OX-40L-Fc, CD40L, CD40L-Fc, 4-1BB ligand, or 4-1BB ligand-Fc), or a member of the B7 family (e.g., CD80, CD86). In some embodiments, the additional immunotherapeutic agent targets CTLA-4, CD28, CD3, PD-1, PD-L1, TIGIT, GITR, OX-40, CD-40, or 4-1BB.

[0552] In some embodiments, the additional therapeutic agent is an immune checkpoint inhibitor. In some embodiments, the immune checkpoint inhibitor is an anti-PD-1 antibody, an anti-PD-L1 antibody, an anti-CTLA-4 antibody, an anti-CD28 antibody, an anti-TIGIT antibody, an anti-LAG3 antibody, an anti-TIM3 antibody, an anti-GITR antibody, an anti-4-1BB antibody, or an anti-OX-40 antibody. In some embodiments, the additional therapeutic agent is an anti-TIGIT antibody. In some embodiments, the additional therapeutic agent is an anti-PD-1 antibody selected from the group consisting of: nivolumab (OPDIVO), pembrolizumab (KEYTRUDA), pidilzumab, MEDI0680, REGN2810, BGB-A317, and PDR001. In some embodiments, the additional therapeutic agent is an anti-PD-L1 antibody selected from the group consisting of: BMS935559 (MDX-1105), atexolizumab (MPDL3280A), durvalumab (MEDI4736), and avelumab (MSB0010718C). In some embodiments, the additional therapeutic agent is an anti-CTLA-4 antibody selected from the group consisting of: ipilimumab (YERVOY) and tremelimumab. In some embodiments, the additional therapeutic agent is an anti-LAG-3 antibody selected from the group consisting of: BMS-986016 and LAG525. In some embodiments, the additional therapeutic agent is an anti-OX-40 antibody selected from the group consisting of: MEDI6469, MEDI0562, and MOXR0916. In some embodiments, the additional therapeutic agent is an anti-4-1BB antibody selected from the group consisting of: PF-05082566.

[0553] In some embodiments, the neoantigen therapeutic can be administered in combination with a biologic molecule selected from the group consisting of: adrenomedullin (AM), angiopoietin (Ang), BMPs, BDNF, EGF, erythropoietin (EPO), FGF, GDNF, granulocyte colony stimulating factor (G-CSF), granulocyte-macrophage colony stimulating factor (GM-CSF), macrophage colony stimulating factor (M-CSF), stem cell factor (SCF), GDF9, HGF, HDGF, IGF, migration-stimulating factor, myostatin (GDF-8), NGF, neurotrophins, PDGF, thrombopoietin, TGF-α, TGF-β, TNF-α, VEGF, P1GF, gamma-IFN, IL-1, IL-2, IL-3, IL-4, IL-5, IL-6, IL-7, IL-12, IL-15, and IL-18.

[0554] In some embodiments, treatment with a neoantigen therapeutic described herein can be accompanied by surgical removal of tumors, removal of cancer cells, or any other surgical therapy deemed necessary by a treating physician.

[0555] In certain embodiments, treatment involves the administration of a neoantigen therapeutic described herein in combination with radiation therapy. Treatment with an agent can occur prior to, concurrently with, or subsequent to administration of radiation therapy. Dosing schedules for such radiation therapy can be determined by the skilled medical practitioner.

[0556] Combined administration can include co-administration, either in a single pharmaceutical formulation or using separate formulations, or consecutive administration in either order but generally within a time period such that all active agents can exert their biological activities simultaneously.

[0557] It will be appreciated that the combination of a neoantigen therapeutic described herein and at least one additional therapeutic agent can be administered in any order or concurrently. In some embodiments, the agent will be administered to patients that have previously undergone treatment with a second therapeutic agent. In certain other embodiments, the neoantigen therapeutic and a second therapeutic agent will be administered substantially simultaneously or concurrently. For example, a subject can be given an agent while undergoing a course of treatment with a second therapeutic agent (e.g., chemotherapy). In certain embodiments, a neoantigen therapeutic will be administered within 1 year of the treatment with a second therapeutic agent. It will further be appreciated that the two (or more) agents or treatments can be administered to the subject within a matter of hours or minutes (i.e., substantially simultaneously).

[0558] For the treatment of a disease, the appropriate dosage of a neoantigen therapeutic described herein depends on the type of disease to be treated, the severity and course of the disease, the responsiveness of the disease, whether the agent is administered for therapeutic or preventative purposes, previous therapy, the patient's clinical history, and so on, all at the discretion of the treating physician. The neoantigen therapeutic can be administered one time or over a series of treatments lasting from several days to several months, or until a cure is effected or a diminution of the disease state is achieved (e.g., reduction in tumor size). Optimal dosing schedules can be calculated from measurements of drug accumulation in the body of the patient and will vary depending on the relative potency of an individual agent. The administering physician can determine optimum dosages, dosing methodologies, and repetition rates.

[0559] In some embodiments, a neoantigen therapeutic can be administered at an initial higher “loading” dose, followed by one or more lower doses. In some embodiments, the frequency of administration can also change. In some embodiments, a dosing regimen can comprise administering an initial dose, followed by additional doses (or “maintenance” doses) once a week, once every two weeks, once every three weeks, or once every month. For example, a dosing regimen can comprise administering an initial loading dose, followed by a weekly maintenance dose of, for example, one-half of the initial dose. Or a dosing regimen can comprise administering an initial loading dose, followed by maintenance doses of, for example one-half of the initial dose every other week. Or a dosing regimen can comprise administering three initial doses for 3 weeks, followed by maintenance doses of, for example, the same amount every other week.

[0560] As is known to those of skill in the art, administration of any therapeutic agent can lead to side effects and/or toxicities. In some cases, the side effects and/or toxicities are so severe as to preclude administration of the particular agent at a therapeutically effective dose. In some cases, therapy must be discontinued, and other agents can be tried. However, many agents in the same therapeutic class display similar side effects and/or toxicities, meaning that the patient either has to stop therapy, or if possible, suffer from the unpleasant side effects associated with the therapeutic agent.

[0561] In some embodiments, the dosing schedule can be limited to a specific number of administrations or “cycles”. In some embodiments, the agent is administered for 3, 4, 5, 6, 7, 8, or more cycles. For example, the agent is administered every 2 weeks for 6 cycles, the agent is administered every 3 weeks for 6 cycles, the agent is administered every 2 weeks for 4 cycles, the agent is administered every 3 weeks for 4 cycles, etc. Dosing schedules can be decided upon and subsequently modified by those skilled in the art.

[0562] The present invention provides methods of administering to a subject a neoantigen therapeutic described herein comprising using an intermittent dosing strategy for administering one or more agents, which can reduce side effects and/or toxicities associated with administration of an agent, chemotherapeutic agent, etc. In some embodiments, a method for treating cancer in a human subject comprises administering to the subject a therapeutically effective dose of a neoantigen therapeutic in combination with a therapeutically effective dose of a chemotherapeutic agent, wherein one or both of the agents are administered according to an intermittent dosing strategy. In some embodiments, a method for treating cancer in a human subject comprises administering to the subject a therapeutically effective dose of a neoantigen therapeutic in combination with a therapeutically effective dose of a second immunotherapeutic agent, wherein one or both of the agents are administered according to an intermittent dosing strategy. In some embodiments, the intermittent dosing strategy comprises administering an initial dose of a neoantigen therapeutic to the subject, and administering subsequent doses of the agent about once every 2 weeks. In some embodiments, the intermittent dosing strategy comprises administering an initial dose of a neoantigen therapeutic to the subject, and administering subsequent doses of the agent about once every 3 weeks. In some embodiments, the intermittent dosing strategy comprises administering an initial dose of a neoantigen therapeutic to the subject, and administering subsequent doses of the agent about once every 4 weeks. In some embodiments, the agent is administered using an intermittent dosing strategy and the additional therapeutic agent is administered weekly.

[0563] The present invention provides compositions comprising the neoantigen therapeutic described herein. The present invention also provides pharmaceutical compositions comprising a neoantigen therapeutic described herein and a pharmaceutically acceptable vehicle. In some embodiments, the pharmaceutical compositions find use in immunotherapy. In some embodiments, the compositions find use in inhibiting tumor growth. In some embodiments, the pharmaceutical compositions find use in inhibiting tumor growth in a subject (e.g., a human patient). In some embodiments, the compositions find use in treating cancer. In some embodiments, the pharmaceutical compositions find use in treating cancer in a subject (e.g., a human patient).

[0564] Formulations are prepared for storage and use by combining a neoantigen therapeutic of the present invention with a pharmaceutically acceptable vehicle (e.g., a carrier or excipient). Those of skill in the art generally consider pharmaceutically acceptable carriers, excipients, and/or stabilizers to be inactive ingredients of a formulation or pharmaceutical composition. Exemplary formulations are listed in WO 2015/095811.

[0565] Suitable pharmaceutically acceptable vehicles include, but are not limited to, nontoxic buffers such as phosphate, citrate, and other organic acids; salts such as sodium chloride; antioxidants including ascorbic acid and methionine; preservatives such as octadecyldimethylbenzyl ammonium chloride, hexamethonium chloride, benzalkonium chloride, benzethonium chloride, phenol, butyl or benzyl alcohol, alkyl parabens, such as methyl or propyl paraben, catechol, resorcinol, cyclohexanol, 3-pentanol, and m-cresol; low molecular weight polypeptides (e.g., less than about 10 amino acid residues); proteins such as serum albumin, gelatin, or immunoglobulins; hydrophilic polymers such as polyvinylpyrrolidone; amino acids such as glycine, glutamine, asparagine, histidine, arginine, or lysine; carbohydrates such as monosaccharides, disaccharides, glucose, mannose, or dextrins; chelating agents such as EDTA; sugars such as sucrose, mannitol, trehalose or sorbitol; salt-forming counter-ions such as sodium; metal complexes such as Zn-protein complexes; and non-ionic surfactants such as TWEEN or polyethylene glycol (PEG). (Remington: The Science and Practice of Pharmacy, 22st Edition, 2012, Pharmaceutical Press, London). In some embodiments, the vehicle is 5% dextrose in water.

[0566] The pharmaceutical compositions described herein can be administered in any number of ways for either local or systemic treatment. Administration can be topical by epidermal or transdermal patches, ointments, lotions, creams, gels, drops, suppositories, sprays, liquids and powders; pulmonary by inhalation or insufflation of powders or aerosols, including by nebulizer, intratracheal, and intranasal; oral; or parenteral including intravenous, intraarterial, intratumoral, subcutaneous, intraperitoneal, intramuscular (e.g., injection or infusion), or intracranial (e.g., intrathecal or intraventricular).

[0567] The therapeutic formulation can be in unit dosage form. Such formulations include tablets, pills, capsules, powders, granules, solutions or suspensions in water or non-aqueous media, or suppositories.

[0568] The neoantigenic peptides described herein can also be entrapped in microcapsules. Such microcapsules are prepared, for example, by coacervation techniques or by interfacial polymerization, for example, hydroxymethylcellulose or gelatin-microcapsules and poly-(methylmethacylate) microcapsules, respectively, in colloidal drug delivery systems (for example, liposomes, albumin microspheres, microemulsions, nanoparticles and nanocapsules) or in macroemulsions as described in Remington: The Science and Practice of Pharmacy, 22st Edition, 2012, Pharmaceutical Press, London.

[0569] In certain embodiments, pharmaceutical formulations include a neoantigen therapeutic described herein complexed with liposomes. Methods to produce liposomes are known to those of skill in the art. For example, some liposomes can be generated by reverse phase evaporation with a lipid composition comprising phosphatidylcholine, cholesterol, and PEG-derivatized phosphatidylethanolamine (PEG-PE). Liposomes can be extruded through filters of defined pore size to yield liposomes with the desired diameter.

[0570] In certain embodiments, sustained-release preparations comprising the neoantigenic peptides described herein can be produced. Suitable examples of sustained-release preparations include semi-permeable matrices of solid hydrophobic polymers containing an agent, where the matrices are in the form of shaped articles (e.g., films or microcapsules). Examples of sustained-release matrices include polyesters, hydrogels such as poly(2-hydroxyethyl-methacrylate) or poly(vinyl alcohol), polylactides, copolymers of L-glutamic acid and 7 ethyl-L-glutamate, non-degradable ethylene-vinyl acetate, degradable lactic acid-glycolic acid copolymers such as the LUPRON DEPOT™ (injectable microspheres composed of lactic acid-glycolic acid copolymer and leuprolide acetate), sucrose acetate isobutyrate, and poly-D-(−)-3-hydroxybutyric acid.

[0571] The present disclosure provides methods of treatment comprising an immunogenic vaccine. Methods of treatment for a disease (such as cancer or a viral infection) are provided. A method can comprise administering to a subject an effective amount of a composition comprising an immunogenic antigen. In some embodiments, the antigen comprises a viral antigen. In some embodiments, the antigen comprises a tumor antigen.

[0572] Non-limiting examples of vaccines that can be prepared include a peptide-based vaccine, a nucleic acid-based vaccine, an antibody based vaccine, a T cell based vaccine, and an antigen-presenting cell based vaccine.

[0573] Vaccine compositions can be formulated using one or more physiologically acceptable carriers including excipients and auxiliaries which facilitate processing of the active agents into preparations which can be used pharmaceutically. Proper formulation can be dependent upon the route of administration chosen. Any of the well-known techniques, carriers, and excipients can be used as suitable and as understood in the art.

[0574] In some cases, the vaccine composition is formulated as a peptide-based vaccine, a nucleic acid-based vaccine, an antibody based vaccine, or a cell based vaccine. For example, a vaccine composition can include naked cDNA in cationic lipid formulations; lipopeptides (e.g., Vitiello, A. et al., J. Clin. Invest. 95:341, 1995), naked cDNA or peptides, encapsulated e.g., in poly(DL-lactide-co-glycolide) (“PLG”) microspheres (see, e.g., Eldridge, et al., Molec. Immunol. 28:287-294, 1991: Alonso et al, Vaccine 12:299-306, 1994; Jones et al, Vaccine 13:675-681, 1995); peptide composition contained in immune stimulating complexes (ISCOMS) (e.g., Takahashi et al, Nature 344:873-875, 1990; Hu et al, Clin Exp Immunol. 113:235-243, 1998); or multiple antigen peptide systems (MAPs) (see e.g., Tam, J. P., Proc. Natl Acad. Sci. U.S.A. 85:5409-5413, 1988; Tarn, J. P., J. Immunol. Methods 196:17-32, 1996). Sometimes, a vaccine is formulated as a peptide-based vaccine, or nucleic acid based vaccine in which the nucleic acid encodes the polypeptides. Sometimes, a vaccine is formulated as an antibody based vaccine. Sometimes, a vaccine is formulated as a cell based vaccine.

[0575] The amino acid sequence of an identified disease-specific immunogenic neoantigen peptide can be used develop a pharmaceutically acceptable composition. The source of antigen can be, but is not limited to, natural or synthetic proteins, including glycoproteins, peptides, and superantigens; antibody/antigen complexes; lipoproteins; RNA or a translation product thereof; and DNA or a polypeptide encoded by the DNA. The source of antigen may also comprise non-transformed, transformed, transfected, or transduced cells or cell lines. Cells may be transformed, transfected, or transduced using any of a variety of expression or retroviral vectors known to those of ordinary skill in the art that may be employed to express recombinant antigens. Expression may also be achieved in any appropriate host cell that has been transformed, transfected, or transduced with an expression or retroviral vector containing a DNA molecule encoding recombinant antigen(s). Any number of transfection, transformation, and transduction protocols known to those in the art may be used. Recombinant vaccinia vectors and cells infected with the vaccina vector, may be used as a source of antigen.

[0576] A composition can comprise a synthetic disease-specific immunogenic neoantigen peptide. A composition can comprise two or more disease-specific immunogenic neoantigen peptides. A composition may comprise a precursor to a disease-specific immunogenic peptide (such as a protein, peptide, DNA and RNA). A precursor to a disease-specific immunogenic peptide can generate or be generated to the identified disease-specific immunogenic neoantigen peptide. In some embodiments, a therapeutic composition comprises a precursor of an immunogenic peptide. The precursor to a disease-specific immunogenic peptide can be a pro-drug. In some embodiments, the composition comprising a disease-specific immunogenic neoantigen peptide may further comprise an adjuvant. For example, the neoantigen peptide can be utilized as a vaccine. In some embodiments, an immunogenic vaccine may comprise a pharmaceutically acceptable immunogenic neoantigen peptide. In some embodiments, an immunogenic vaccine may comprise a pharmaceutically acceptable precursor to an immunogenic neoantigen peptide (such as a protein, peptide, DNA and RNA). In some embodiments, a method of treatment comprises administering to a subject an effective amount of an antibody specifically recognizing an immunogenic neoantigen peptide. In some embodiments, a method of treatment comprises administering to a subject an effective amount of a soluble TCR or TCR analog specifically recognizing an immunogenic neoantigen peptide.

[0577] The methods described herein are particularly useful in the personalized medicine context, where immunogenic neoantigen peptides are used to develop therapeutics (such as vaccines or therapeutic antibodies) for the same individual. Thus, a method of treating a disease in a subject can comprise identifying an immunogenic neoantigen peptide in a subject according to the methods described herein; and synthesizing the peptide (or a precursor thereof); and administering the peptide or an antibody specifically recognizing the peptide to the subject. In some embodiments, an expression pattern of an immunogenic neoantigen can serve as the essential basis for the generation of patient specific vaccines. In some embodiments, an expression pattern of an immunogenic neoantigen can serve as the essential basis for the generation of a vaccine for a group of patients with a particular disease. Thus, particular diseases, e.g., particular types of tumors, can be selectively treated in a patient group.

[0578] In some embodiments, the peptides described herein are structurally normal (“shared”) antigens that can be recognized by autologous anti-disease T cells in a large patient group. In some embodiments, an antigen-expression pattern of a group of diseased subjects whose disease expresses structurally normal (“shared”) neoantigens is determined.

[0579] There are a variety of ways in which to produce immunogenic neoantigens. Proteins or peptides may be made by any technique known to those of skill in the art, including the expression of proteins, polypeptides or peptides through standard molecular biological techniques, the isolation of proteins or peptides from natural sources, in vitro translation, or the chemical synthesis of proteins or peptides. In general, such disease specific neoantigens may be produced either in vitro or in vivo. Immunogenic neoantigens may be produced in vitro as peptides or polypeptides, which may then be formulated into a personalized vaccine or immunogenic composition and administered to a subject. In vitro production of immunogenic neoantigens can comprise peptide synthesis or expression of a peptide/polypeptide from a DNA or RNA molecule in any of a variety of bacterial, eukaryotic, or viral recombinant expression systems, followed by purification of the expressed peptide/polypeptide. Alternatively, immunogenic neoantigens can be produced in vivo by introducing molecules (e.g., DNA, RNA, and viral expression systems) that encode an immunogenic neoantigen into a subject, whereupon the encoded immunogenic neoantigens are expressed. In some embodiments, a polynucleotide encoding an immunogenic neoantigen peptide can be used to produce the neoantigen peptide in vitro.

[0580] In some embodiments, a polynucleotide comprises a sequence with at least 60%, 65%, 70% 1, 75%, 80%/0, 85%, 90%, 95%, 96%, 97%, 98%, 99%/0, or 100% identity to a polynucleotide encoding an immunogenic neoantigen.

[0581] The polynucleotide may be, e.g., DNA, cDNA, PNA, CNA, RNA, single- and/or double-stranded, native or stabilized forms of polynucleotides, or combinations thereof. A nucleic acid encoding an immunogenic neoantigen peptide may or may not contain introns so long as it codes for the peptide. In some embodiments in vitro translation is used to produce the peptide.

[0582] Expression vectors comprising sequences encoding the neoantigen, as well as host cells containing the expression vectors, are also contemplated. Expression vectors suitable for use in the present invention can comprise at least one expression control element operationally linked to the nucleic acid sequence. The expression control elements are inserted in the vector to control and regulate the expression of the nucleic acid sequence. Examples of expression control elements are well known in the art and include, for example, the lac system, operator and promoter regions of phage lambda, yeast promoters and promoters derived from polyoma, adenovirus, retrovirus or SV40. Additional operational elements include, but are not limited to, leader sequences, termination codons, polyadenylation signals and any other sequences necessary or preferred for the appropriate transcription and subsequent translation of the nucleic acid sequence in the host system. It will be understood by one skilled in the art the correct combination of expression control elements will depend on the host system chosen. It will further be understood that the expression vector should contain additional elements necessary for the transfer and subsequent replication of the expression vector containing the nucleic acid sequence in the host system. Examples of such elements include, but are not limited to, origins of replication and selectable markers.

[0583] The neoantigen peptides may be provided in the form of RNA or cDNA molecules encoding the desired neoantigen peptides. One or more neoantigen peptides of the invention may be encoded by a single expression vector. Generally, the DNA is inserted into an expression vector, such as a plasmid, in proper orientation and correct reading frame for expression, if necessary, the DNA may be linked to the appropriate transcriptional and translational regulatory control nucleotide sequences recognized by the desired host (e.g., bacteria), although such controls are generally available in the expression vector. The vector is then introduced into the host bacteria for cloning using standard techniques. Useful expression vectors for eukaryotic hosts, especially mammals or humans include, for example, vectors comprising expression control sequences from SV40, bovine papilloma virus, adenovirus and cytomegalovirus. Useful expression vectors for bacterial hosts include known bacterial plasmids, such as plasmids from E. coli, including pCR 1, pBR322, pMB9 and their derivatives, wider host range plasmids, such as M13 and filamentous single-stranded DNA phages.

[0584] In embodiments, a DNA sequence encoding a polypeptide of interest can be constructed by chemical synthesis using an oligonucleotide synthesizer. Such oligonucleotides can be designed based on the amino acid sequence of the desired polypeptide and selecting those codons that are favored in the host cell in which the recombinant polypeptide of interest is produced. Standard methods can be applied to synthesize an isolated polynucleotide sequence encoding an isolated polypeptide of interest.

[0585] Suitable host cells for expression of a polypeptide include prokaryotes, yeast, insect or higher eukaryotic cells under the control of appropriate promoters. Prokaryotes include gram negative or gram positive organisms, for example E. coli or bacilli. Higher eukaryotic cells include established cell lines of mammalian origin. Cell-free translation systems can also be employed. Appropriate cloning and expression vectors for use with bacterial, fungal, yeast, and mammalian cellular hosts are well known in the art. Various mammalian or insect cell culture systems can be employed to express recombinant protein. Exemplary mammalian host cell lines include, but are not limited to COS-7, L cells, C127, 3T3, Chinese hamster ovary (CHO), 293, HeLa and BHK cell lines. Mammalian expression vectors can comprise nontranscribed elements such as an origin of replication, a suitable promoter and enhancer linked to the gene to be expressed, and other 5′ or 3′ flanking nontranscribed sequences, and 5′ or 3′ nontranslated sequences, such as necessary ribosome binding sites, a polyadenylation site, splice donor and acceptor sites, and transcriptional termination sequences.

[0586] The proteins produced by a transformed host can be purified according to any suitable method. Such standard methods include chromatography (e.g., ion exchange, affinity and sizing column chromatography, and the like), centrifugation, differential solubility, or by any other standard technique for protein purification. Affinity tags such as hexahistidine (SEQ ID NO: 1834), maltose binding domain, influenza coat sequence, glutathione-S-transferase, and the like can be attached to the protein to allow easy purification by passage over an appropriate affinity column. Isolated proteins can also be physically characterized using such techniques as proteolysis, nuclear magnetic resonance and x-ray crystallography.

[0587] A vaccine can comprise an entity that binds a polypeptide sequence described herein. The entity can be an antibody. Antibody-based vaccine can be formulated using any of the well-known techniques, carriers, and excipients as suitable and as understood in the art. In some embodiments, the peptides described herein can be used for making neoantigen specific therapeutics such as antibody therapeutics. For example, neoantigens can be used to raise and/or identify antibodies specifically recognizing the neoantigens. These antibodies can be used as therapeutics. The antibody can be a natural antibody, a chimeric antibody, a humanized antibody, or can be an antibody fragment. The antibody may recognize one or more of the polypeptides described herein. The antibody can recognize a polypeptide that has a sequence that is at most 40%, 50%, 60%, 70%, 80%, 90%, 95%, or less in sequence homology to a polypeptide described herein. The antibody can recognize a polypeptide that has a sequence that is at least 40%/0, 50%, 60%, 70%, 80%, 90%/0, 95%, or more in sequence homology to a polypeptide described herein. The antibody can also recognize a polypeptide with sequence length is at least 30%, 40%/0, 50%, 60%, 70%, 80%, 90%/0, 95%, or more in sequence length compared to a polypeptide described herein. The antibody can recognize a polypeptide with a sequence length at most 30%, 40%, 50%, 60%, 70%, 80%/0, 90%, 95%, or less in sequence length compared to a polypeptide described herein.

[0588] The present invention also contemplates the use of nucleic acid molecules as vehicles for delivering neoantigen peptides/polypeptides to the subject in need thereof, in vivo, in the form of, e.g., DNA/RNA vaccines.

[0589] In some embodiments, the vaccine is a nucleic acid vaccine. In some embodiments, neoantigens can be administered to a subject by use of a plasmid. Plasmids may be introduced into animal tissues by a number of different methods, e.g., injection or aerosol instillation of naked DNA on mucosal surfaces, such as the nasal and lung mucosa. In some embodiments, physical delivery, such as with a “gene-gun” may be used. The exact choice of expression vectors can depend upon the peptide/polypeptides to be expressed, and is well within the skill of the ordinary artisan.

[0590] In some embodiments, the nucleic acid encodes an immunogenic peptide or peptide precursor. In some embodiments, the nucleic acid vaccine comprises sequences flanking the sequence coding the immunogenic peptide or peptide precursor. In some embodiments, the nucleic acid vaccine comprises more than one immunogenic epitope. In some embodiments, the nucleic acid vaccine is a DNA-based vaccine. In some embodiments, the nucleic acid vaccine is a RNA-based vaccine. In some embodiments, the RNA-based vaccine comprises mRNA. In some embodiments, the RNA-based vaccine comprises naked mRNA. In some embodiments, the RNA-based vaccine comprises modified mRNA (e.g., mRNA protected from degradation using protamine. mRNA containing modified 5′ CAP structure or mRNA containing modified nucleotides). In some embodiments, the RNA-based vaccine comprises single-stranded mRNA.

[0591] The polynucleotide may be substantially pure, or contained in a suitable vector or delivery system. Suitable vectors and delivery systems include viral, such as systems based on adenovirus, vaccinia virus, retroviruses, herpes virus, adeno-associated virus or hybrids containing elements of more than one virus. Non-viral delivery systems include cationic lipids and cationic polymers (e.g., cationic liposomes).

[0592] One or more neoantigen peptides can be encoded and expressed in vivo using a viral based system. Viral vectors may be used as recombinant vectors in the present invention, wherein a portion of the viral genome is deleted to introduce new genes without destroying infectivity of the virus. The viral vector of the present invention is a nonpathogenic virus. In some embodiments the viral vector has a tropism for a specific cell type in the mammal. In another embodiment, the viral vector of the present invention is able to infect professional antigen presenting cells such as dendritic cells and macrophages. In yet another embodiment of the present invention, the viral vector is able to infect any cell in the mammal. The viral vector may also infect tumor cells. Viral vectors used in the present invention include but is not limited to Poxvirus such as vaccinia virus, avipox virus, fowlpox virus and a highly attenuated vaccinia virus (Ankara or MVA), retrovirus, adenovirus, baculovirus and the like.

[0593] A vaccine can be delivered via a variety of routes. Delivery routes can include oral (including buccal and sub-lingual), rectal, nasal, topical, transdermal patch, pulmonary, vaginal, suppository, or parenteral (including intramuscular, intraarterial, intrathecal, intradermal, intraperitoneal, subcutaneous and intravenous) administration or in a form suitable for administration by aerosolization, inhalation or insufflation. General information on drug delivery systems can be found in Ansel et al., Pharmaceutical Dosage Forms and Drug Delivery Systems (Lippencott Williams & Wilkins, Baltimore Md. (1999). The vaccine described herein can be administered to muscle, or can be administered via intradermal or subcutaneous injections, or transdermally, such as by iontophoresis. Epidermal administration of the vaccine can be employed.

[0594] In some instances, the vaccine can also be formulated for administration via the nasal passages. Formulations suitable for nasal administration, wherein the carrier is a solid, can include a coarse powder having a particle size, for example, in the range of about 10 to about 500 microns which is administered in the manner in which snuff is taken, i.e., by rapid inhalation through the nasal passage from a container of the powder held close up to the nose. The formulation can be a nasal spray, nasal drops, or by aerosol administration by nebulizer. The formulation can include aqueous or oily solutions of the vaccine.

[0595] The vaccine can be a liquid preparation such as a suspension, syrup or elixir. The vaccine can also be a preparation for parenteral, subcutaneous, intradermal, intramuscular or intravenous administration (e.g., injectable administration), such as a sterile suspension or emulsion.

[0596] The vaccine can include material for a single immunization, or may include material for multiple immunizations (i.e. a ‘multidose’ kit). The inclusion of a preservative is preferred in multidose arrangements. As an alternative (or in addition) to including a preservative in multidose compositions, the compositions can be contained in a container having an aseptic adaptor for removal of material.

[0597] The vaccine can be administered in a dosage volume of about 0.5 mL, although a half dose (i.e. about 0.25 mL) can be administered to children. Sometimes the vaccine can be administered in a higher dose e.g. about 1 ml.

[0598] The vaccine can be administered as a 1, 2, 3, 4, 5, 6, 7, 8, 9, 10, or more dose-course regimen. Sometimes, the vaccine is administered as a 1, 2, 3, or 4 dose-course regimen. Sometimes the vaccine is administered as a 1 dose-course regimen. Sometimes the vaccine is administered as a 2 dose-course regimen.

[0599] The administration of the first dose and second dose can be separated by about 0 day, 1 day, 2 days, 5 days, 7 days, 14 days, 21 days, 30 days, 2 months, 4 months, 6 months, 9 months, 1 year, 1.5 years, 2 years, 3 years, 4 years, or more.

[0600] The vaccine described herein can be administered every 1, 2, 3, 4, 5, 6, 7, 8, 9, 10, or more years. Sometimes, the vaccine described herein is administered every 2, 3, 4, 5, 6, 7, or more years. Sometimes, the vaccine described herein is administered every 4, 5, 6, 7, or more years. Sometimes, the vaccine described herein is administered once.

[0601] The dosage examples are not limiting and are only used to exemplify particular dosing regiments for administering a vaccine described herein. The effective amount for use in humans can be determined from animal models. For example, a dose for humans can be formulated to achieve circulating, liver, topical and/or gastrointestinal concentrations that have been found to be effective in animals. Based on animal data, and other types of similar data, those skilled in the art can determine the effective amounts of a vaccine composition appropriate for humans.

[0602] The effective amount when referring to an agent or combination of agents will generally mean the dose ranges, modes of administration, formulations, etc., that have been recommended or approved by any of the various regulatory or advisory organizations in the medical or pharmaceutical arts (e.g., FDA, AMA) or by the manufacturer or supplier.

[0603] In some aspects, the vaccine and kit described herein can be stored at between 2° C. and 8° C. In some instances, the vaccine is not stored frozen. In some instances, the vaccine is stored in temperatures of such as at −20° C. or −80° C. In some instances, the vaccine is stored away from sunlight.

### VIII. Kits

[0604] The neoantigen therapeutic described herein can be provided in kit form together with instructions for administration. Typically the kit would include the desired neoantigen therapeutic in a container, in unit dosage form and instructions for administration. Additional therapeutics, for example, cytokines, lymphokines, checkpoint inhibitors, antibodies, can also be included in the kit. Other kit components that can also be desirable include, for example, a sterile syringe, booster dosages, and other desired excipients.

[0605] Kits and articles of manufacture are also provided herein for use with one or more methods described herein. The kits can contain one or more neoantigen polypeptides. The kits can also contain nucleic acids that encode one or more of the polypeptides described herein, antibodies that recognize one or more of the polypeptides described herein, or APC-based cells activated with one or more of the polypeptides described herein. The kits can further contain adjuvants, reagents, and buffers necessary for the makeup and delivery of the vaccines.

[0606] The kits can also include a carrier, package, or container that is compartmentalized to receive one or more containers such as vials, tubes, and the like, each of the container(s) comprising one of the separate elements, such as the polypeptides and adjuvants, to be used in a method described herein. Suitable containers include, for example, bottles, vials, syringes, and test tubes. The containers can be formed from a variety of materials such as glass or plastic.

[0607] The articles of manufacture provided herein contain packaging materials. Examples of pharmaceutical packaging materials include, but are not limited to, blister packs, bottles, tubes, bags, containers, bottles, and any packaging material suitable for a selected formulation and intended mode of administration and treatment. A kit typically includes labels listing contents and/or instructions for use, and package inserts with instructions for use. A set of instructions will also typically be included.

[0608] The invention will be described in greater detail by way of specific examples. The following examples are offered for illustrative purposes, and are not intended to limit the invention in any manner. Those of skill in the art will readily recognize a variety of non-critical parameters that can be changed or modified to yield alternative embodiments according to the invention. All patents, patent applications, and printed publications listed herein are incorporated herein by reference in their entirety.

### EXAMPLES

### Example 1: Identification of Mutant Sequences with Immunogenic Potential

[0609] Applicants have discovered mutations that are recurrent in cancer patients. See, Tables 1 and 2.

[0610] Neoantigenic peptides described herein can be derived from the mutations listed in Tables 1 and 2. For example, a neoantigenic peptide can be derived from a substitution mutation, e.g., the KRAS G12V mutation. The neonatigenic peptide can be a peptide comprising 5, 6, 7, 8, 9, 10, 11, 12, 13, 14, 15, 16, 17, 18, 19, 20, 25, 30, 35, 40, 45, 50, 60, 70, 80, 90, or 100 amino acid residues of the protein, e.g., KRAS including the substitution (G12V). The substitution may be positioned anywhere along the length of the neoantigenic peptide. For example, it can be located in the N terminal third of the neoantigenic peptide, the central third of the neoantigenic peptide or the C terminal third of the neoantigenic peptide. In another example, the substituted residue is located 2-5 residues away from the N terminal end or 2-5 residues away from the C terminal end. Neoantigenic peptides can similarly derived from tumor specific insertion mutations where the neonatigenic peptide comprises one or more, or all of the inserted residues.

[0611] Neoantigenic peptides can also be derived from frame shift mutation, fusion polypeptides, in-frame deletions, and splice variants. The tumor specific polypeptides resulting from these mutations can be characterized by the existence of a transition point between a polypeptide sequence encoded by the germline and the tumor specific mutant polypeptide encoded by the tumor specific mutation. The neonatigenic peptide can be a peptide of about 5, 6, 7, 8, 9, 10, 11, 12, 13, 14, 15, 16, 17, 18, 19, 20, 25, 30, 35, 40, 45, 50, 60, 70, 80, 90, or 100 amino acid residues that encompasses the transition point between the germline encoded native sequence and the tumor specific polypeptide sequence. The transition point can be positioned anywhere along the length of the neoantigenic peptide. For example, it can be located in the N terminal third of the neoantigenic peptide, the central third of the neoantigenic peptide or the C terminal third of the neoantigenic peptide. In another example, the transition point is located 2-5 residues away from the N terminal end or 2-5 residues away from the C terminal end. A neoantigenic peptide derived from frame shift mutation and splice variants can also be a peptide consisting of tumor specific mutant residues.

[0612] For each mutation event listed in Tables 1 and 2, the full-length amino acid sequence of the mutant protein was derived. Any constituent 9mer or 10mer not found in the germline protein sequence was flagged as a neo-peptide and scored for binding potential on six common HLA alleles (HLA-A01:01, HLA-A02:01. HLA-A03:01, HLA-A11:01, HLA-A24:02, HLA-B07:02, and HLA-B08:01) using available algorithms. Any peptide scoring better than 1000 nM was nominated. The nominated peptides are listed in Tables 1 and 2

TABLE 1

| Gene | Exemplary Protein Change | Mutation Sequence Context | Peptides (HLA allele example(s)) | Exemplary Diseases |
|---|---|---|---|---|
| TABLE 1A | | POINT MUTATION¹ | | |
| ABL1 | E255K | VADGLITTLHYPA | GQYGKVYEG (A02.01) (SEQ ID NO: 892) | Chronic myeloid |
| | | PKRNKPTVYGVS | GQYGKVYEGV (A02.01) (SEQ ID NO: 893) | leukemia (CML), |
| | | PNYDKWEMERT | KLGGGQYGK (A03.01) (SEQ ID NO: 894) | Acute lymphocytic |
| | | DITMKHKLGGGQ | KLGGGQYGKV (A02.01) (SEQ ID NO: 895) | leukemia (ALL), |
| | | YGKVYEGVWKK | KVYEGVWKK (A02.01, A03.01) (SEQ ID NO: 896) | Gastrointestinal |
| | | YSLTVAVKTLKE | KVYEGVWKKY (A03.01) (SEQ ID NO: 897) | stromal tumors |
| | | DTMEVEEFLKEA | QYGKVYEGV (A24.02) (SEQ ID NO: 898) | (GIST) |
| | | AVMKEIKHPNLV | QYGKVYEGVW (A24.02) (SEQ ID NO: 899) | |
| | | QLLGVC (SEQ ID | | |
| | | NO: 1) | | |
| ABL1 | E255V | VADGLITTLHYPA | GQYGVVYEG (A02.01) (SEQ ID NO: 900) | Chronic myeloid |
| | | PKRNKPTVYGVS | GQYGVVYEGV (A02.01) (SEQ ID NO: 901) | leukemia (CML), |
| | | PNYDKWEMERT | KLGGGQYGV (A02.01) (SEQ ID NO: 902) | Acute lymphocytic |
| | | DITMKHKLGGGQ | KLGGGQYGVV (A02.01) (SEQ ID NO: 903) | leukemia (ALL), |
| | | YGVVYEGVWKK | QYGVVYEGV (A24.02) (SEQ ID NO: 904) | Gastrointestinal |
| | | YSLTVAVKTLKE | QYGVVYEGVW (A24.02) (SEQ ID NO: 905) | stromal tumors |
| | | DTMEVEEFLKEA | VVYEGVWKK (A02.01, A03.01) (SEQ ID NO: 906) | (GIST) |
| | | AVMKEIKHPNLV | VVYEGVWKKY (A03.01) (SEQ ID NO: 907) | |
| | | QLLGVC (SEQ ID | | |
| | | NO: 2) | | |
| ABL1 | M351T | LLGVCTREPPFYII | ATQISSATEY (A01.01) (SEQ ID NO: 908) | Chronic myeloid |
| | | TEFMTYGNLLDY | ISSATEYLEK (A03.01) (SEQ ID NO: 909) | leukemia (CML), |
| | | LRECNRQEVNAV | SSATEYLEK (A03.01) (SEQ ID NO: 910) | Acute lymphocytic |
| | | VLLYMATQISSAT | TQISSATEYL (A02.01) (SEQ ID NO: 911) | leukemia (ALL), |
| | | EYLEKKNFIHRDL | YMATQISSAT (A02.01) (SEQ ID NO: 912) | Gastrointestinal |
| | | AARNCLVGENHL | | stromal tumors |
| | | VKVADFGLSRLM | | (GIST) |
| | | TGDTYTAHAGAK | | |
| | | F (SEQ ID NO: 3) | | |
| ABL1 | T315I | SLTVAVKTLKED | FYIIIEFMTY (A24.02) (SEQ ID NO: 913) | Chronic myeloid |
| | | TMEVEEFLKEAA | IIEFMTYGNL (A02.01) (SEQ ID NO: 914) | leukemia (CML), |
| | | VMKEIKHPNLVQ | IIIEFMTYG (A02.01) (SEQ ID NO: 915) | Acute lymphocytic |
| | | LLGVCTREPPFYII | IIIEFMTYGN (A02.01) (SEQ ID NO: 916) | leukemia (ALL), |
| | | IEFMTYGNLLDYL | YIIIEFMTYG (A02.01) (SEQ ID NO: 917) | Gastrointestinal |
| | | RECNRQEVNAVV | | stromal tumors |
| | | LLYMATQISSAM | | (GIST) |
| | | EYLEKKNFIHRDL | | |
| | | A (SEQ ID NO: 4) | | |
| ABL1 | Y253H | STVADGLITTLHY | GQHGEVYEGV (A02.01) (SEQ ID NO: 918) | Chronic myeloid |
| | | PAPKRNKPTVYG | KLGGGQHGEV (A02.01) (SEQ ID NO: 919) | leukemia (CML), |
| | | VSPNYDKWEMER | | Acute lymphocytic |
| | | TDITMKHKLGGG | | leukemia (ALL), |
| | | QHGEVYEGVWK | | Gastrointestinal |
| | | KYSLTVAVKTLK | | stromal tumors |
| | | EDTMEVEEFLKE | | (GIST) |
| | | AAVMKEIKHPNL | | |
| | | VQLLG (SEQ ID | | |
| | | NO: 5) | | |
| ALK | G1269A | SSLAMLDLLHVA | KIADFGMAR (A03.01) (SEQ ID NO: 920) | NSCLC |
| | | RDIACGCQYLEE | RVAKIADFGM (A02.01, B07.02) (SEQ ID NO: 921) | |
| | | NHFIHRDIAARNC | | |
| | | LLTCPGPGRVAKI | | |
| | | ADFGMARDIYRA | | |
| | | SYYRKGGCAMLP | | |
| | | VKWMPPEAFME | | |
| | | GIFTSKTDTWSFG | | |
| | | VLL (SEQ ID NO: | | |
| | | 6) | | |
| ALK | L1196M | QVAVKTLPEVCS | FILMELMAGG (A02.01) (SEQ ID NO: 922) | NSCLC |
| | | EQDELDFLMEALI | ILMELMAGG (A02.01) (SEQ ID NO: 923) | |
| | | ISKFNHQNIVRCI | ILMELMAGGD (A02.01) (SEQ ID NO: 924) | |
| | | GVSLQSLPRFILM | LMELMAGGDL (A02.01) (SEQ ID NO: 925) | |
| | | ELMAGGDLKSFL | LPRFILMEL (B07.02, B08.01) (SEQ ID NO: 926) | |
| | | RETRPRPSQPSSL | LPRFILMELM (B07.02) (SEQ ID NO: 927) | |
| | | AMLDLLHVARDI | LQSLPRFILM (A02.01, B08.01) (SEQ ID NO: 928) | |
| | | ACGCQYLEENHFI | SLPRFILMEL (A02.01, A24.02, B07.02, B08.01) (SEQ | |
| | | (SEQ ID NO: 7) | ID NO: 929) | |
| BRAF | V600E | MIKLIDIARQTAQ | LATEKSRWS (A02.01, B08.01) (SEQ ID NO: 930) | CRC, GBM, KIRP, |
| | | GMDYLHAKSIIHR | LATEKSRWSG (A02.01, B08.01) (SEQ ID NO: 931) | LUAD, SKCM, |
| | | DLKSNNIFLHEDL | | THCA |
| | | TVKIGDFGLATEK | | |
| | | SRWSGSHQFEQL | | |
| | | SGSILWMAPEVIR | | |
| | | MQDKNPYSFQSD | | |
| | | VYAFGIVLYELM | | |
| | | (SEQ ID NO: 8) | | |
| BTK | C481S | MIKEGSMSEDEFI | EYMANGSLL (A24.02) (SEQ ID NO: 932) | CLL |
| | | EEAKVMMNLSHE | MANGSLLNY (A01.01, A03.01, A11.01) (SEQ ID NO: | |
| | | KLVQLYGVCTKQ | 933) | |
| | | RPIFIITEYMANGS | MANGSLLNYL (A02.01, B07.02, B08.01) (SEQ ID NO: | |
| | | LLNYLREMRHRF | 934) | |
| | | QTQQLLEMCKDV | SLLNYLREM (A02.01, B07.02, B08.01) (SEQ ID NO: | |
| | | CEAMEYLESKQF | 935) | |
| | | LHRDLAARNCLV | YMANGSLLN (A02.01) (SEQ ID NO: 936) | |
| | | ND (SEQ ID NO: 9) | YMANGSLLNY (A01.01, A03.01, A11.01) (SEQ ID NO: | |
| | | | 937) | |
| EEF1B2 | S43G | MGFGDLKSPAGL | GPPPADLCHAL (B07.02) (SEQ ID NO: 938) | BLCA, KIRP, |
| | | QVLNDYLADKSY | | PRAD, SKCM |
| | | IEGYVPSQADVA | | |
| | | VFEAVSGPPPADL | | |
| | | CHALRWYNHIKS | | |
| | | YEKEKASLPGVK | | |
| | | KALGKYGPADVE | | |
| | | DTTGSGAT (SEQ | | |
| | | ID NO: 10) | | |
| EGFR | S492R | SLNITSLGLRSLK | IIRNRGENSCK (A03.01) (SEQ ID NO: 939) | CRC |
| | | EISDGDVIISGNK | | |
| | | NLCYANTINWKK | | |
| | | LFGTSGQKTKIIR | | |
| | | NRGENSCKATGQ | | |
| | | VCHALCSPEGCW | | |
| | | GPEPRDCVSCRN | | |
| | | VSRGRECVDKCN | | |
| | | LL (SEQ ID NO: | | |
| | | 11) | | |
| EGFR | T790M | IPVAIKELREATSP | CLTSTVQLIM (A01.01, A02.01) (SEQ ID NO: 940) | NSCLC, PRAD |
| | | KANKEILDEAYV | IMQLMPFGC (A02.01) (SEQ ID NO: 941) | |
| | | MASVDNPHVCRL | IMQLMPFGCL (A02.01, A24.02, B08.01) (SEQ ID NO: | |
| | | LGICLTSTVQLIM | 942) | |
| | | QLMPFGCLLDYV | LIMQLMPFG (A02.01) (SEQ ID NO: 943) | |
| | | REHKDNIGSQYLL | LIMQLMPFGC (A02.01) (SEQ ID NO: 944) | |
| | | NWCVQIAKGMN | LTSTVQLIM (A01.01) (SEQ ID NO: 945) | |
| | | YLEDRRLVHRDL | MQLMPFGCL (A02.01, B07.02, B08.01) (SEQ ID NO: | |
| | | AA (SEQ ID NO: | 946) | |
| | | 12) | MQLMPFGCLL (A02.01, A24.02, B08.01) (SEQ ID NO: | |
| | | | 947) | |
| | | | QLIMQLMPF (A02.01, A24.02, B08.01) (SEQ ID NO: | |
| | | | 948) | |
| | | | QLIMQLMPFG (A02.01) (SEQ ID NO: 949) | |
| | | | STVQLIMQL (A02.01) (SEQ ID NO: 950) | |
| | | | VQLIMQLMPF (A02.01, A24.02, B08.01) (SEQ ID NO: | |
| | | | 951) | |
| ERBB3 | V104M | ERCEVVMGNLEI | | CRC, Stomach |
| | | VLTGHNADLSFL | | Cancer |
| | | QWIREVTGYVLV | | |
| | | AMNEFSTLPLPNL | | |
| | | RMVRGTQVYDG | | |
| | | KFAIFVMLNYNT | | |
| | | NSSHALRQLRLT | | |
| | | QLTEILSGGVYIE | | |
| | | KNDK (SEQ ID | | |
| | | NO: 13) | | |
| ESR1 | D538G | HLMAKAGLTLQQ | GLLLEMLDA (A02.01) (SEQ ID NO: 952) | Breast Cancer |
| | | QHQRLAQLLLILS | LYGLLLEML (A24.02) (SEQ ID NO: 953) | |
| | | HIRHMSNKGMEH | NVVPLYGLL (A02.01) (SEQ ID NO: 954) | |
| | | LYSMKCKNVVPL | PLYGLLLEM (A02.01) (SEQ ID NO: 955) | |
| | | YGLLLEMLDAHR | PLYGLLLEML (A02.01, A24.02) (SEQ ID NO: 956) | |
| | | LHAPTSRGGASV | VPLYGLLLEM (B07.02) (SEQ ID NO: 957) | |
| | | EETDQSHLATAG | VVPLYGLLL (A02.01, A24.02) (SEQ ID NO: 958) | |
| | | STSSHSLQKYYIT | | |
| | | GEA (SEQ ID NO: | | |
| | | 14) | | |
| ESR1 | S463P | NQGKCVEGMVEI | FLPSTLKSL (A02.01, A24.02, B08.01) (SEQ ID NO: | Breast Cancer |
| | | FDMLLATSSRFR | 959) | |
| | | MMNLQGEEFVCL | GVYTFLPST (A02.01) (SEQ ID NO: 960) | |
| | | KSIILLNSGVYTFL | GVYTFLPSTL (A02.01, A24.02) (SEQ ID NO: 961) | |
| | | PSTLKSLEEKDHI | TFLPSTLKSL (A24.02) (SEQ ID NO: 962) | |
| | | HRVLDKITDTLIH | VYTFLPSTL (A24.02) (SEQ ID NO: 963) | |
| | | LMAKAGLTLQQQ | YIELPSTLK (A03.01) (SEQ ID NO: 964) | |
| | | HQRLAQLLLILSH | | |
| | | (SEQ ID NO: 15) | | |
| ESR1 | Y537C | IHLMAKAGLTLQ | NVVPLCDLL (A02.01) (SEQ ID NO: 965) | Breast Cancer |
| | | QQHQRLAQLLLIL | NVVPLCDLLL (A02.01) (SEQ ID NO: 966) | |
| | | SHIRHMSNKGME | PLCDLLLEM (A02.01) (SEQ ID NO: 967) | |
| | | HLYSMKCKNVVP | PLCDLLLEML (A02.01) (SEQ ID NO: 968) | |
| | | LCDLLLEMLDAH | VPLCDLLLEM (B07.02) (SEQ ID NO: 969) | |
| | | RLHAPTSRGGAS | VVPLCDLLL (A02.01, A24.02) (SEQ ID NO: 970) | |
| | | VEETDQSHLATA | | |
| | | GSTSSHSLQKYYI | | |
| | | TGE (SEQ ID NO: | | |
| | | 16) | | |
| ESR1 | Y537N | IHLMAKAGLTLQ | NVVPLNDLL (A02.01) (SEQ ID NO: 971) | Breast Cancer |
| | | QQHQRLAQLLLIL | NVVPLNDLLL (A02.01) (SEQ ID NO: 972) | |
| | | SHIRHMSNKGME | PLNDLLLEM (A02.01) (SEQ ID NO: 973) | |
| | | HLYSMKCKNVVP | PLNDLLLEML (A02.01) (SEQ ID NO: 974) | |
| | | LNDLLLEMLDAH | VPLNDLLLEM (B07.02) (SEQ ID NO: 975) | |
| | | RLHAPTSRGGAS | | |
| | | VEETDQSHLATA | | |
| | | GSTSSHSLQKYYI | | |
| | | TGE (SEQ ID NO: | | |
| | | 17) | | |
| ESR1 | Y537S | IHLMAKAGLTLQ | NVVPLSDLL (A02.01) (SEQ ID NO: 976) | Breast Cancer |
| | | QQHQRLAQLLLIL | NVVPLSDLLL (A02.01) (SEQ ID NO: 977) | |
| | | SHIRHMSNKGME | PLSDLLLEM (A02.01) (SEQ ID NO: 978) | |
| | | HLYSMKCKNVVP | PLSDLLLEML (A02.01) (SEQ ID NO: 979) | |
| | | LSDLLLEMLDAH | VPLSDLLLEM (B07.02) (SEQ ID NO: 980) | |
| | | RLHAPTSRGGAS | VVPLSDLLL (A02.01, A24.02) (SEQ ID NO: 981) | |
| | | VEETDQSHLATA | | |
| | | GSTSSHSLQKYYI | | |
| | | TGE (SEQ ID NO: | | |
| | | 18) | | |
| FGFR3 | S249C | HRIGGIKLRHQQ | VLERCPHRPI (A02.01, B08.01) (SEQ ID NO: 982) | BLCA, HNSC, |
| | | WSLVMESVVPSD | YTLDVLERC (A02.01) (SEQ ID NO: 983) | KIRP, LUSC |
| | | RGNYTCVVENKF | | |
| | | GSIRQTYTLDVLE | | |
| | | RCPHRPILQAGLP | | |
| | | ANQTAVLGSDVE | | |
| | | FHCKVYSDAQPHI | | |
| | | QWLKHVEVNGS | | |
| | | KVG (SEQ ID NO: | | |
| | | 19) | | |
| FRG1B | L52S | AVKLSDSRIALKS | FQNGKMALS (A02.01) (SEQ ID NO: 984) | GBM, KIRP, |
| | | GYGKYLGINSDE | | PRAD, SKCM |
| | | LVGHSDAIGPREQ | | |
| | | WEPVFQNGKMA | | |
| | | LSASNSCFIRCNE | | |
| | | AGDIEAKSKTAG | | |
| | | EEEMIKIRSCAEK | | |
| | | ETKKKDDIPEEDK | | |
| | | G (SEQ ID NO: 20) | | |
| HER2 | V777L | GSGAFGTVYKGI | VMAGLGSPYV (A02.01, A03.01) (SEQ ID NO: 985) | BRCA |
| | (Resistance) | WIPDGENVKIPVA | | |
| | | IKVLRENTSPKAN | | |
| | | KEILDEAYVMAG | | |
| | | LGSPYVSRLLGIC | | |
| | | LTSTVQLVTQLM | | |
| | | PYGCLLDHVREN | | |
| | | RGRLGSQDLLNW | | |
| | | CM (SEQ ID NO: | | |
| | | 21) | | |
| IDH1 | R132H | RVEEFKLKQMW | KPIIIGHHA (B07.02) (SEQ ID NO: 986) | BLCA, GBM, |
| | | KSPNGTIRNILGG | | PRAD |
| | | TVFREAIICKNIPR | | |
| | | LVSGWVKPIIIGH | | |
| | | HAYGDQYRATDF | | |
| | | VVPGPGKVEITYT | | |
| | | PSDGTQKVTYLV | | |
| | | HNFEEGGGVAMG | | |
| | | M (SEQ ID NO: 22) | | |
| IDH1 | R132C | RVEEFKLKQMW | KPIIIGCHA (B07.02) (SEQ ID NO: 987) | BLCA, GBM, |
| | | KSPNGTIRNILGG | | PRAD |
| | | TVFREAIICKNIPR | | |
| | | LVSGWVKPIIIGC | | |
| | | HAYGDQYRATDF | | |
| | | VVPGPGKVEITYT | | |
| | | PSDGTQKVTYLV | | |
| | | HNFEEGGGVAMG | | |
| | | M (SEQ ID NO: 23) | | |
| IDH1 | R132G | RVEEFKLKQMW | KPIIIGGHA (B07.02) (SEQ ID NO: 988) | BLCA, BRCA, |
| | | KSPNGTIRNILGG | | CRC, GBM, |
| | | TVFREAIICKNIPR | | HNSC, LUAD, |
| | | LVSGWVKPIIIGG | | PAAD, PRAD, |
| | | HAYGDQYRATDF | | UCEC |
| | | VVPGPGKVEITYT | | |
| | | PSDGTQKVTYLV | | |
| | | HNFEEGGGVAMG | | |
| | | M (SEQ ID NO: 24) | | |
| IDH1 | R132S | RVEEFKLKQMW | KPIIIGSHA (B07.02) (SEQ ID NO: 989) | BLCA, BRCA, |
| | | KSPNGTIRNILGG | | GBM, HNSC, |
| | | TVFREAIICKNIPR | | LIHC, LUAD, |
| | | LVSGWVKPIIIGS | | LUSC, PAAD, |
| | | HAYGDQYRATDF | | SKCM, UCEC |
| | | VVPGPGKVEITYT | | |
| | | PSDGTQKVTYLV | | |
| | | HNFEEGGGVAMG | | |
| | | M (SEQ ID NO: 25) | | |
| KIT | T670I | VAVKMLKPSAHL | IIEYCCYGDL (A02.01) (SEQ ID NO: 990) | Gastrointestinal |
| | | TEREALMSELKV | TIGGPTLVII (A02.01) (SEQ ID NO: 991) | stromal tumors |
| | | LSYLGNHMNIVN | VIIEYCCYG (A02.01) (SEQ ID NO: 992) | (GIST) |
| | | LLGACTIGGPTLV | | |
| | | IIEYCCYGDLLNF | | |
| | | LRRKRDSFICSKQ | | |
| | | EDHAEAALYKNL | | |
| | | LHSKESSCSDSTN | | |
| | | E (SEQ ID NO: 890) | | |
| KIT | V654A | VEATAYGLIKSD | HMNIANLLGA (A02.01) (SEQ ID NO: 993) | Gastrointestinal |
| | | AAMTVAVKMLK | IANLLGACTI (A02.01) (SEQ ID NO: 994) | stromal tumors |
| | | PSAHLTEREALMS | MNIANLLGA (A02.01) (SEQ ID NO: 995) | (GIST) |
| | | ELKVLSYLGNHM | YLGNHMNIA (A02.01, B08.01) (SEQ ID NO: 996) | |
| | | NIANLLGACTIGG | YLGNHMNIAN (A02.01) (SEQ ID NO: 997) | |
| | | PTLVITEYCCYGD | | |
| | | LLNFLRRKRDSFI | | |
| | | CSKQEDHAEAAL | | |
| | | YK (SEQ ID NO: | | |
| | | 26) | | |
| MEK | C121S | ISELGAGNGGVVF | VLHESNSPY (A03.01) (SEQ ID NO: 998) | Melanoma |
| | | KVSHKPSGLVMA | VLHESNSPYI (A02.01) (SEQ ID NO: 999) | |
| | | RKLIHLEIKPAIRN | | |
| | | QIIRELQVLHESN | | |
| | | SPYIVGFYGAFYS | | |
| | | DGEISICMEHMD | | |
| | | GGSLDQVLKKAG | | |
| | | RIPEQILGKVSI | | |
| | | (SEQ ID NO: 27) | | |
| MEK | P124L | LGAGNGGVVFKV | LQVLHECNSL (A02.01, B08.01) (SEQ ID NO: 1000) | Melanoma |
| | | SHKPSGLVMARK | LYIVGFYGAF (A24.02) (SEQ ID NO: 1001) | |
| | | LIHLEIKPAIRNQII | NSLYIVGFY (A01.01) (SEQ ID NO: 1002) | |
| | | RELQVLHECNSL | QVLHECNSL (A02.01, B08.01) (SEQ ID NO: 1003) | |
| | | YIVGFYGAFYSD | SLYIVGFYG (A02.01) (SEQ ID NO: 1004) | |
| | | GEISICMEHMDG | SLYIVGFYGA (A02.01) (SEQ ID NO: 1005) | |
| | | GSLDQVLKKAGR | VLHECNSLY (A03.01) (SEQ ID NO: 1006) | |
| | | IPEQILGKVSIAVI | VLHECNSLYI (A02.01, A03.01) (SEQ ID NO: 1007) | |
| | | (SEQ ID NO: 28) | | |
| MYC | E39D | MPLNVSFTNRNY | FYQQQQQSDL (A24.02) (SEQ ID NO: 1008) | Lymphoid Cancer; |
| | | DLDYDSVQPYFY | QQQSDLQPPA (A02.01) (SEQ ID NO: 1009) | Burkitt Lymphoma |
| | | CDEEENFYQQQQ | QQSDLQPPA (A02.01) (SEQ ID NO: 1010) | |
| | | QSDLQPPAPSEDI | YQQQQQSDL (A02.01, B08.01) (SEQ ID NO: 1011) | |
| | | WKKFELLPTPPLS | | |
| | | PSRRSGLCSPSYV | | |
| | | AVTPFSLRGDND | | |
| | | GG (SEQ ID NO: | | |
| | | 29) | | |
| MYC | P57S | FTNRNYDLDYDS | FELLSTPPL (A02.01, B08.01) (SEQ ID NO: 1012) | Lymphoid Cancer |
| | | VQPYFYCDEEEN | LLSTPPLSPS (A02.01) (SEQ ID NO: 1013) | |
| | | FYQQQQQSELQP | | |
| | | PAPSEDIWKKFEL | | |
| | | LSTPPLSPSRRSGL | | |
| | | CSPSYVAVTPFSL | | |
| | | RGDNDGGGGSFS | | |
| | | TADQLEMVTELL | | |
| | | G (SEQ ID NO: 30) | | |
| MYC | T58I | TNRNYDLDYDSV | FELLPIPPL (A02.01) (SEQ ID NO: 1014) | Neuroblastoma |
| | | QPYFYCDEEENF | IWKKFELLPI (A24.02) (SEQ ID NO: 1015) | |
| | | YQQQQQSELQPP | LLPIPPLSPS (A02.01, B07.02) (SEQ ID NO: 1016) | |
| | | APSEDIWKKFELL | LPIPPLSPS (B07.02) (SEQ ID NO: 1017) | |
| | | PIPPLSPSRRSGLC | | |
| | | SPSYVAVTPFSLR | | |
| | | GDNDGGGGSFST | | |
| | | ADQLEMVTELLG | | |
| | | G (SEQ ID NO: 31) | | |
| PDGFRa | T674I | VAVKMLKPTARS | IIEYCFYGDL (A02.01) (SEQ ID NO: 1018) | Chronic |
| | | SEKQALMSELKI | IIIEYCFYG (A02.01) (SEQ ID NO: 1019) | Eosinophilic |
| | | MTHLGPHLNIVN | IYIIIEYCF (A24.02) (SEQ ID NO: 1020) | Leukemia |
| | | LLGACTKSGPIYII | IYIIIEYCFY (A24.02) (SEQ ID NO: 1021) | |
| | | IEYCFYGDLVNYL | YIIIEYCFYG (A02.01) (SEQ ID NO: 1022) | |
| | | HKNRDSFLSHHPE | | |
| | | KPKKELDIFGLNP | | |
| | | ADESTRSYVILS | | |
| | | (SEQ ID NO: 32) | | |
| PIK3CA | E542K | IEEHANWSVSRE | KITEQEKDFL (A02.01) (SEQ ID NO: 1023) | BLCA, BRCA, |
| | | AGFSYSHAGLSN | | CESC, CRC, GBM, |
| | | RLARDNELREND | | HNSC, KIRC, |
| | | KEQLKAISTRDPL | | KIRP, LIHC, |
| | | SKITEQEKDFLWS | | LUAD, LUSC, |
| | | HRHYCVTIPEILP | | PRAD, UCEC |
| | | KLLLSVKWNSRD | | |
| | | EVAQMYCLVKD | | |
| | | WPP (SEQ ID NO: | | |
| | | 33) | | |
| PIK3CA | E545K | HANWSVSREAGF | STRDPLSEITK (A03.01) (SEQ ID NO: 1024) | BLCA, BRCA, |
| | | SYSHAGLSNRLA | DPLSEITK (A03.01) (SEQ ID NO: 1025) | CESC, CRC, GBM, |
| | | RDNELRENDKEQ | | HNSC, KIRC, |
| | | LKAISTRDPLSEIT | | KIRP, LIHC, |
| | | KQEKDFLWSHRH | | LUAD, LUSC, |
| | | YCVTIPEILPKLLL | | PRAD, SKCM, |
| | | SVKWNSRDEVAQ | | UCEC |
| | | MYCLVKDWPPIK | | |
| | | P (SEQ ID NO: 34) | | |
| PIK3CA | H1047R | LFINLFSMMLGSG | | BRCA, CESC, |
| | | MPELQSFDDIAYI | | CRC, GBM, |
| | | RKTLALDKTEQE | | HNSC, LIHC, |
| | | ALEYFMKQMND | | LUAD, LUSC, |
| | | ARHGGWTTKMD | | PRAD, UCEC |
| | | WIFHTIKQHALN | | |
| | | (SEQ ID NO: 35) | | |
| POLE | P286R | QRGGVITDEEETS | LPLKFRDAET (B07.02) (SEQ ID NO: 1026) | Colorectal |
| | | KKIADQLDNIVD | | adenocarcinoma; |
| | | MREYDVPYHIRL | | Uterine/Endometrium |
| | | SIDIETTKLPLKFR | | Adenocarcinoma; |
| | | DAETDQIMMISY | | Colorectal |
| | | MIDGQGYLITNRE | | adenocarcinoma, |
| | | IVSEDIEDFEFTPK | | MSI+; |
| | | PEYEGPFCVFN | | Uterine/Endometrium |
| | | (SEQ ID NO: 36) | | Adenocarcinoma, |
| | | | | MSI+; |
| | | | | Endometrioid |
| | | | | carcinoma; |
| | | | | Endometrium |
| | | | | Serous carcinoma; |
| | | | | Endometrium |
| | | | | Carcinosarcoma- |
| | | | | malignant |
| | | | | mesodermal mixed |
| | | | | tumour; Glioma; |
| | | | | Astrocytoma; GBM |
| PTEN | R130Q | KFNCRVAQYPFE | QTGVMICAYL (A02.01) (SEQ ID NO: 1027) | BRCA, CESC, |
| | | DHNPPQLELIKPF | | CRC, GBM, KIRC, |
| | | CEDLDQWLSEDD | | LUSC, UCEC |
| | | NHVAAIHCKAGK | | |
| | | GQTGVMICAYLL | | |
| | | HRGKFLKAQEAL | | |
| | | DFYGEVRTRDKK | | |
| | | GVTIPSQRRYVYY | | |
| | | YSY (SEQ ID NO: | | |
| | | 37) | | |
| RAC1 | P29S | MQAIKCVVVGDG | AFSGEYIPTV (A02.01, A24.02) (SEQ ID NO: 1028) | Melanoma |
| | | AVGKTCLLISYTT | | |
| | | NAFSGEYIPTVFD | | |
| | | NYSANVMVDGK | | |
| | | PVNLGLWDTAGQ | | |
| | | EDYDRLRPLSYPQ | | |
| | | TVGET (SEQ ID | | |
| | | NO: 38) | | |
| TP53 | G245S | IRVEGNLRVEYLD | SMNRRPILT (A02.01, B08.01) (SEQ ID NO: 1029) | BLCA, BRCA, |
| | | DRNTFRHSVVVP | YMCNSSCMGS (A02.01) (SEQ ID NO: 1030) | CRC, GBM, |
| | | YEPPEVGSDCTTI | | HNSC, LUSC, |
| | | HYNYMCNSSCM | | PAAD, PRAD |
| | | GSMNRRPILTIITL | | |
| | | EDSSGNLLGRNSF | | |
| | | EVRVCACPGRDR | | |
| | | RTEEENLRKKGEP | | |
| | | (SEQ ID NO: 39) | | |
| TP53 | R175H | TYSPALNKMFCQ | | BLCA, BRCA, |
| | | LAKTCPVQLWVD | | CRC, GBM, |
| | | STPPPGTRVRAM | | HNSC, LUAD, |
| | | AIYKQSQHMTEV | | PAAD, PRAD, |
| | | VRHCPHHERCSD | | UCEC |
| | | SDGLAPPQHLIRV | | |
| | | EGNLRVEYLDDR | | |
| | | NTFRHSVVVPYEP | | |
| | | PEV (SEQ ID NO: | | |
| | | 40) | | |
| TP53 | R248Q | EGNLRVEYLDDR | GMNQRPILT (A02.01) (SEQ ID NO: 1031) | BLCA, BRCA, |
| | | NTFRHSVVVPYEP | | CRC, GBM, |
| | | PEVGSDCTTIHYN | | HNSC, KIRC, |
| | | YMCNSSCMGGM | | LIHC, LUSC, |
| | | NQRPILTIITLEDS | | PAAD, PRAD, |
| | | SGNLLGRNSFEVR | | UCEC |
| | | VCACPGRDRRTE | | |
| | | EENLRKKGEPHH | | |
| | | E (SEQ ID NO: 41) | | |
| TP53 | R248W | EGNLRVEYLDDR | GMNWRPILT (A02.01) (SEQ ID NO: 1032) | BLCA, BRCA, |
| | | NTFRHSVVVPYEP | | CRC, GBM, |
| | | PEVGSDCTTIHYN | | HNSC, LIHC, |
| | | YMCNSSCMGGM | | LUSC, PAAD, |
| | | NWRPILTIITLEDS | | SKCM, UCEC |
| | | SGNLLGRNSFEVR | | |
| | | VCACPGRDRRTE | | |
| | | EENLRKKGEPHH | | |
| | | E (SEQ ID NO: 42) | | |
| TP53 | R273C | PEVGSDCTTIHYN | LLGRNSFEVC (A02.01) (SEQ ID NO: 1033) | BLCA, BRCA, |
| | | YMCNSSCMGGM | | CRC, GBM, |
| | | NRRPILTIITLEDS | | HNSC, LUSC, |
| | | SGNLLGRNSFEVC | | PAAD, UCEC |
| | | VCACPGRDRRTE | | |
| | | EENLRKKGEPHH | | |
| | | ELPPGSTKRALPN | | |
| | | NTSSSPQPKKKPL | | |
| | | (SEQ ID NO: 43) | | |
| TABLE 1B | | MSI-ASSOCIATED FRAMESHIFTS¹ | | |
| ACVR2A | D96fs; +1 | GVEPCYGDKDKR | | MSI+ CRC, MSI+ |
| | | RHCFATWKNISG | | Uterine/Endometrium |
| | | SIEIVKQGCWLDD | | Cancer, MSI+ |
| | | INCYDRTDCVEK | | Stomach Cancer, |
| | | KRQP* (SEQ ID | | Lynch syndrome |
| | | NO: 83) | | |
| ACVR2A | D96fs; −1 | GVEPCYGDKDKR | ALKYIFVAV (A02.01, B08.01) (SEQ ID NO: 1034) | MSI+ CRC, MSI+ |
| | | RHCFATWKNISG | ALKYIFVAVR (A03.01) (SEQ ID NO: 1035) | Uterine/Endometrium |
| | | SIEIVKQGCWLDD | AVRAICVMK (A03.01) (SEQ ID NO: 1036) | Cancer, MSI+ |
| | | INCYDRTDCVEK | AVRAICVMKS (A03.01) (SEQ ID NO: 1037) | Stomach Cancer, |
| | | KTALKYIFVAVR | CVEKKTALK (A03.01) (SEQ ID NO: 1038) | Lynch syndrome |
| | | AICVMKSFLIFRR | CVEKKTALKY (A01.01) (SEQ ID NO: 1039) | |
| | | WKSHSPLQIQLHL | CVMKSFLIF (A24.02, B08.01) (SEQ ID NO: 1040) | |
| | | SHPITTSCSIPWCH | CVMKSFLIFR (A03.01) (SEQ ID NO: 1041) | |
| | | LC* (SEQ ID NO: | FLIFRRWKS (A02.01, B08.01) (SEQ ID NO: 1042) | |
| | | 84) | FRRWKSHSPL (B08.01) (SEQ ID NO: 1043) | |
| | | | FVAVRAICV (A02.01, B08.01) (SEQ ID NO: 1044) | |
| | | | FVAVRAICVM (B08.01) (SEQ ID NO: 1045) | |
| | | | IQLHLSHPI (A02.01) (SEQ ID NO: 1046) | |
| | | | KSFLIFRRWK (A03.01) (SEQ ID NO: 1047) | |
| | | | KTALKYIFV (A02.01) (SEQ ID NO: 1048) | |
| | | | KYIFVAVRAI (A24.02) (SEQ ID NO: 1049) | |
| | | | RWKSHSPLQI (A24.02) (SEQ ID NO: 1050) | |
| | | | TALKYIFVAV (A02.01, B08.01) (SEQ ID NO: 1051) | |
| | | | VAVRAICVMK (A03.01) (SEQ ID NO: 1052) | |
| | | | VMKSFLIFR (A03.01) (SEQ ID NO: 1053) | |
| | | | VMKSFLIFRR (A03.01) (SEQ ID NO: 1054) | |
| | | | YIFVAVRAI (A02.01) (SEQ ID NO: 1055) | |
| C15ORF40 | L132fs; +1 | TAEAVNVAIAAPP | ALFFFFFET (A02.01) (SEQ ID NO: 1056) | MSI+ CRC, MSI+ |
| | | SEGEANAELCRY | ALFFFFEETK (A03.01) (SEQ ID NO: 1057) | Uterine/Endometrium |
| | | LSKVLELRKSDV | AQAGVQWRSL (A02.01) (SEQ ID NO: 1058) | Cancer, MSI+ |
| | | VLDKVGLALFFFF | CLANFCIFNR (A03.01) (SEQ ID NO: 1059) | Stomach Cancer, |
| | | FETKSCSVAQAG | CLSFLSSWDY (A01.01, A03.01) (SEQ ID NO: 1060) | Lynch syndrome |
| | | VQWRSLGSLQPP | FFETKSCSV (B08.01) (SEQ ID NO: 1061) | |
| | | PPGFKLFSCLSFLS | FFFETKSCSV (A02.01) (SEQ ID NO: 1062) | |
| | | SWDYRRMPPCLA | FKLFSCLSFL (A02.01) (SEQ ID NO: 1063) | |
| | | NFCIFNRDGVSPC | FLSSWDYRRM (A02.01) (SEQ ID NO: 1064) | |
| | | WSGWS* (SEQ ID | GFKLFSCLSF (A24.02) (SEQ ID NO: 1065) | |
| | | NO: 85) | KLFSCLSFL (A02.01, A03.01) (SEQ ID NO: 1066) | |
| | | | KLFSCLSFLS (A02.01, A03.01) (SEQ ID NO: 1067) | |
| | | | LALFFFFFET (A02.01) (SEQ ID NO: 1068) | |
| | | | LFFFFEETK (A03.01) (SEQ ID NO: 1069) | |
| | | | LSFLSSWDY (A01.01) (SEQ ID NO: 1070) | |
| | | | LSFLSSWDYR (A03.01) (SEQ ID NO: 1071) | |
| | | | RMPPCLANF (A24.02) (SEQ ID NO: 1072) | |
| | | | RRMPPCLANF (A24.02) (SEQ ID NO: 1073) | |
| | | | SLQPPPPGFK (A03.01) (SEQ ID NO: 1074) | |
| | | | VQWRSLGSL (A02.01) (SEQ ID NO: 1075) | |
| CNOT1 | L1544fs; +1 | LSVIIFFFVYIWH | FFFSVIFST (A02.01) (SEQ ID NO: 1076) | MSI+ CRC, MSI+ |
| | | WALPLILNNHHIC | MSVCFFFFSV (A02.01) (SEQ ID NO: 1077) | Uterine/Endometrium |
| | | LMSSIILDCNSVR | SVCFFFFSV (A02.01, B08.01) (SEQ ID NO: 1078) | Cancer, MSI+ |
| | | QSIMSVCFFFFSVI | SVCFFFFSVI (A02.01) (SEQ ID NO: 1079) | Stomach Cancer, |
| | | FSTRCLTDSRYPN | | Lynch syndrome |
| | | ICWFK* (SEQ ID | | |
| | | NO: 86) | | |
| CNOT1 | L1544fs; −1 | LSVIIFFFVYIWH | FFCYILNTMIF (A24.02) (SEQ ID NO: 1080) | MSI+ CRC, MSI+ |
| | | WALPLILNNHHIC | MSVCFFFFCY (A01.01) (SEQ ID NO: 1081) | Uterine/Endometrium |
| | | LMSSIILDCNSVR | SVCFFFFCYI (A02.01) (SEQ ID NO: 1082) | Cancer, MSI+ |
| | | QSIMSVCFFFFCYI | | Stomach Cancer, |
| | | LNTMFDR* (SEQ | | Lynch syndrome |
| | | ID NO: 87) | | |
| EIF2B3 | A151fs; −1 | VLVLSCDLITDVA | KQWSSVTSL (A02.01) (SEQ ID NO: 1083) | MSI+ CRC, MSI+ |
| | | LHEVVDLFRAYD | VLWMPTSTV (A02.01) (SEQ ID NO: 1084) | Uterine/Endometrium |
| | | ASLAMLMRKGQ | | Cancer, MSI+ |
| | | DSIEPVPGQKGKK | | Stomach Cancer, |
| | | KQWSSVTSLEWT | | Lynch syndrome |
| | | AQERGCSSWLMK | | |
| | | QTWMKSWSLRD | | |
| | | PSYRSILEYVSTR | | |
| | | VLWMPTSTV* | | |
| | | (SEQ ID NO: 88) | | |
| EPHB2 | K1020fs; −1 | SIQVMRAQMNQI | ILIRKAMTV (A02.01) (SEQ ID NO: 1085) | MSI+ CRC, MSI+ |
| | | QSVEGQPLARRP | | Uterine/Endometrium |
| | | RATGRTKRCQPR | | Cancer, MSI+ |
| | | DVTKKTCNSNDG | | Stomach Cancer, |
| | | KKREWEKRKQIL | | Lynch syndrome |
| | | GGGGKYKEYFLK | | |
| | | RILIRKAMTVLAG | | |
| | | DKKGLGRFMRCV | | |
| | | QSETKAVSLQLPL | | |
| | | GR* (SEQ ID NO: | | |
| | | 89) | | |
| ESRP1 | N512fs; +1 | LDFLGEFATDIRT | | MSI+ CRC, MSI+ |
| | | HGVHMVLNHQG | | Uterine/Endometrium |
| | | RPSGDAFIQMKSA | | Cancer, MSI+ |
| | | DRAFMAAQKCH | | Stomach Cancer, |
| | | KKKHEGQIC* | | Lynch syndrome |
| | | (SEQ ID NO: 90) | | |
| ESRP1 | N512fs; −1 | LDFLGEFATDIRT | | MSI+ CRC, MSI+ |
| | | HGVHMVLNHQG | | Uterine/Endometrium |
| | | RPSGDAFIQMKSA | | Cancer, MSI+ |
| | | DRAFMAAQKCH | | Stomach Cancer, |
| | | KKT* (SEQ ID NO: | | Lynch syndrome |
| | | 91) | | |
| FAM111B | A273fs. −1 | GALCKDGRFRSDI | RMKVPLMK (A03.01) (SEQ ID NO: 1086) | MSI+ CRC, MSI+ |
| | | GEFEWKLKEGHK | | Uterine/Endometrium |
| | | KIYGKQSMVDEV | | Cancer, MSI+ |
| | | SGKVLEMDISKK | | Stomach Cancer, |
| | | KHYNRKISIKKLN | | Lynch syndrome |
| | | RMKVPLMKLITR | | |
| | | V* (SEQ ID NO: | | |
| | | 92) | | |
| GBP3 | T585fs; −1 | RERAQLLEEQEK | TLKKKPRDI (B08.01) (SEQ ID NO: 1087) | MSI+ CRC, MSI+ |
| | | TLTSKLQEQARV | | Uterine/Endometrium |
| | | LKERCQGESTQL | | Cancer, MSI+ |
| | | QNEIQKLQKTLK | | Stomach Cancer, |
| | | KKPRDICRIS* | | Lynch syndrome |
| | | (SEQ ID NO: 93) | | |
| JAK1 | P861fs; +1 | VNTLKEGKRLPC | LIEGFEALLK (A03.01) (SEQ ID NO: 1088) | MSI+ CRC, MSI+ |
| | | PPNCPDEVYQLM | | Uterine/Endometrium |
| | | RKCWEFQPSNRT | | Cancer, MSI+ |
| | | SFQNLIEGFEALL | | Stomach Cancer, |
| | | KTSN* (SEQ ID | | Lynch syndrome |
| | | NO: 94) | | |
| JAK1 | K860fs; −1 | CRPVTPSCKELAD | QQLKWTPHI (A02.01) (SEQ ID NO: 1089) | MSI+ CRC, MSI+ |
| | | LMTRCMNYDPN | QLKWTPHILK (A03.01) (SEQ ID NO: 1090) | Uterine/Endometrium |
| | | QRPFFRAIMRDIN | IVSEKNQQLK (A03.01) (SEQ ID NO: 1091) | Cancer, MSI+ |
| | | KLEEQNPDIVSEK | QLKWTPHILK (A03.01) (SEQ ID NO: 1090) | Stomach Cancer, |
| | | NQQLKWTPHILK | QQLKWTPHI (A24.02) (SEQ ID NO: 1089) | Lynch syndrome |
| | | SAS* (SEQ ID NO: | NQQLKWTPHIL (B08.01) (SEQ ID NO: 1092) | |
| | | 95) | NQQLKWTPHI (B08.01) (SEQ ID NO: 1093) | |
| | | | QLKWTPHIL (B08.01) (SEQ ID NO: 1094) | |
| LMAN1 | E305fs; +1 | DDHDVLSFLTFQL | GPPRPPRAAC (B07.02) (SEQ ID NO: 1095) | MSI+ CRC, MSI+ |
| | | TEPGKEPPTPDKE | PPRPPRAAC (B07.02) (SEQ ID NO: 1096) | Uterine/Endometrium |
| | | ISEKEKEKYQEEF | | Cancer, MSI+ |
| | | EHFQQELDKKKR | | Stomach Cancer, |
| | | GIPEGPPRPPRAA | | Lynch syndrome |
| | | CGGNI* (SEQ ID | | |
| | | NO: 96) | | |
| LMAN1 | E305fs; −1 | DDHDVLSFLTFQL | SLRRKYLRV (B08.01) (SEQ ID NO: 1097) | MSI+ CRC, MSI+ |
| | | TEPGKEPPTPDKE | | Uterine/Endometrium |
| | | ISEKEKEKYQEEF | | Cancer, MSI+ |
| | | EHFQQELDKKKR | | Stomach Cancer, |
| | | NSRRATPTSKGSL | | Lynch syndrome |
| | | RRKYLRV* (SEQ | | |
| | | ID NO: 97) | | |
| MSH3 | N385fs; +1 | TKSTLIGEDVNPLI | SAACHRRGCV (B08.01) (SEQ ID NO: 1098) | MSI+ CRC, MSI+ |
| | | KLDDAVNVDEIM | | Uterine/Endometrium |
| | | TDTSTSYLLCISE | | Cancer, MSI+ |
| | | NKENVRDKKKG | | Stomach Cancer, |
| | | QHFYWHCGSAAC | | Lynch syndrome |
| | | HRRGCV* (SEQ ID | | |
| | | NO: 98) | | |
| MSH3 | K383fs; −1 | LYTKSTLIGEDVN | ALWECSLPQA (A02.01) (SEQ ID NO: 1099) | MSI+CRC, MSI+ |
| | | PLIKLDDAVNVD | CLIVSRTLL (B08.01) (SEQ ID NO: 1100) | Uterine/Endometrium |
| | | EIMTDTSTSYLLCI | CLIVSRTLLL (A02.01, B08.01) (SEQ ID NO: 1101) | Cancer, MSI+ |
| | | SENKENVRDKKR | FLLALWECS (A02.01) (SEQ ID NO: 1102) | Stomach Cancer, |
| | | ATFLLALWECSLP | FLLALWECSL (A02.01, B08.01) (SEQ ID NO: 1103) | Lynch syndrome |
| | | QARLCLIVSRTLL | IVSRTLLLV (A02.01) (SEQ ID NO: 1104) | |
| | | LVQS* (SEQ ID | LIVSRTLLL (A02.01, B08.01) (SEQ ID NO: 1105) | |
| | | NO: 99) | LIVSRTLLLV (A02.01) (SEQ ID NO: 1106) | |
| | | | LLALWECSL (A02.01, B08.01) (SEQ ID NO: 1107) | |
| | | | LPQARLCLI (B08.01, B07.02) (SEQ ID NO: 1108) | |
| | | | LPQARLCLIV (B08.01) (SEQ ID NO: 1109) | |
| | | | NVRDKKRATF (B08.01) (SEQ ID NO: 1110) | |
| | | | SLPQARLCLI (A02.01, B08.01) (SEQ ID NO: 1111) | |
| NDUFC2 | A70fs; +1 | LPPPKLTDPRLLYI | FFCWILSCK (A03.01) (SEQ ID NO: 1112) | MSI+ CRC, MSI+ |
| | | GFLGYCSGLIDNL | FFFCWILSCK (A03.01) (SEQ ID NO: 1113) | Uterine/Endometrium |
| | | IRRRPIATAGLHR | ITAFFFCWI (A02.01) (SEQ ID NO: 1114) | Cancer, MSI+ |
| | | QLLYITAFFFCWI | LYITAFFFCW (A24.02) (SEQ ID NO: 1115) | Stomach Cancer, |
| | | LSCKT* (SEQ ID | YITAFFFCWI (A02.01) (SEQ ID NO: 1116) | Lynch syndrome |
| | | NO: 100) | | |
| NDUFC2 | F69fs; −1 | SLPPPKLTDPRLL | ITAFFLLDI (A02.01) (SEQ ID NO: 1117) | MSI+ CRC, MSI+ |
| | | YIGFLGYCSGLID | LLYITAFFL (A02.01, B08.01) (SEQ ID NO: 1118) | Uterine/Endometrium |
| | | NLIRRRPIATAGL | LLYITAFFLL (A02.01, A24.02) (SEQ ID NO: 1119) | Cancer, MSI+ |
| | | HRQLLYITAFFLL | LYITAFFLL (A24.02) (SEQ ID NO: 1120) | Stomach Cancer, |
| | | DIIL* (SEQ ID NO: | LYITAFFLLD (A24.02) (SEQ ID NO: 1121) | Lynch syndrome |
| | | 101) | YITAFFLLDI (A02.01) (SEQ ID NO: 1122) | |
| RBM27 | Q817; +1 | NQSGGAGEDCQI | GSNEVTTRY (A01.01) (SEQ ID NO: 1123) | MSI+ CRC, MSI+ |
| | | FSTPGHPKMIYSS | MPKDVNIQV (B07.02) (SEQ ID NO: 1124) | Uterine/Endometrium |
| | | SNLKTPSKLCSGS | TGSNEVTTRY (A01.01) (SEQ ID NO: 1125) | Cancer, MSI+ |
| | | KSHDVQEVLKKK | | Stomach Cancer, |
| | | TGSNEVTTRYEE | | Lynch syndrome |
| | | KKTGSVRKANRM | | |
| | | PKDVNIQVRKKQ | | |
| | | KHETRRKSKYNE | | |
| | | DFERAWREDLTI | | |
| | | KR* (SEQ ID NO: | | |
| | | 102) | | |
| RPL22 | K16fs; +1 | MAPVKKLVVKG | | MSI+ CRC, MSI+ |
| | | GKKKEASSEVHS* | | Uterine/Endometrium |
| | | (SEQ ID NO: 103) | | Cancer, MSI+ |
| | | | | Stomach Cancer, |
| | | | | Lynch syndrome |
| RPL22 | K15fs; −1 | MAPVKKLVVKG | | MSI+ CRC, MSI+ |
| | | GKKRSKF* (SEQ | | Uterine/Endometrium |
| | | ID NO: 104) | | Cancer, MSI+ |
| | | | | Stomach Cancer, |
| | | | | Lynch syndrome |
| SEC31A | I462fs; +1 | MPSHQGAEQQQQ | | MSI+ CRC, MSI+ |
| | | QHHVFISQVVTEK | | Uterine/Endometrium |
| | | EFLSRSDQLQQA | | Cancer, MSI+ |
| | | VQSQGFINYCQK | | Stomach Cancer, |
| | | KN* (SEQ ID NO: | | Lynch syndrome |
| | | 105) | | |
| SEC31A | I462fs; −1 | MPSHQGAEQQQQ | KKLMLLRLNL (A02.01) (SEQ ID NO: 1126) | MSI+ CRC, MSI+ |
| | | QHHVFISQVVTEK | KLMLLRLNL (A02.01, A03.01, B07.02, B08.01) (SEQ | Uterine/Endometrium |
| | | EFLSRSDQLQQA | ID NO: 1127) | Cancer, MSI+ |
| | | VQSQGFINYCQK | KLMLLRLNLR (A03.01) (SEQ ID NO: 1128) | Stomach Cancer, |
| | | KLMLLRLNLRKM | LLRLNLRKM (B08.01) (SEQ ID NO: 1129) | Lynch syndrome |
| | | CGPF* (SEQ ID | LMLLRLNL (B08.01) (SEQ ID NO: 1130) | |
| | | NO: 106) | LMLLRLNLRK (A03.01) (SEQ ID NO: 1131) | |
| | | | LNLRKMCGPF (B08.01) (SEQ ID NO: 1132) | |
| | | | MLLRLNLRK (A03.01) (SEQ ID NO: 1133) | |
| | | | MLLRLNLRKM (A02.01, A03.01, B08.01) (SEQ ID NO: | |
| | | | 1134) | |
| | | | NLRKMCGPF (B08.01) (SEQ ID NO: 1135) | |
| | | | NYCQKKLMLL (A24.02) (SEQ ID NO: 1136) | |
| | | | YCQKKLMLL (B08.01) (SEQ ID NO: 1137) | |
| SEC63 | K530fs; +1 | AEVFEKEQSICAA | FKKKTYTCAI (B08.01) (SEQ ID NO: 1138) | MSI+ CRC, MSI+ |
| | | EEQPAEDGQGET | ITTVKATETK (A03.01) (SEQ ID NO: 1139) | Uterine/Endometrium |
| | | NKNRTKGGWQQ | KSKKKETFK (A03.01) (SEQ ID NO: 1140) | Cancer, MSI+ |
| | | KSKGPKKTAKSK | KSKKKETFKK (A03.01) (SEQ ID NO: 1141) | Stomach Cancer, |
| | | KKETFKKKTYTC | KTYTCAITTV (A02.01, A24.02) (SEQ ID NO: 1142) | Lynch syndrome |
| | | AITTVKATETKAG | TFKKKTYTC (B08.01) (SEQ ID NO: 1143) | |
| | | KWSRWE* (SEQ | TYTCAITTV (A24.02) (SEQ ID NO: 1144) | |
| | | ID NO: 107) | TYTCAITTVK (A03.01) (SEQ ID NO: 1145) | |
| | | | YTCAITTVK (A03.01) (SEQ ID NO: 1146) | |
| SEC63 | K529fs; −1 | MAEVFEKEQSICA | TAKSKKRNL (B08.01) (SEQ ID NO: 1147) | MSI+ CRC, MSI+ |
| | | AEEQPAEDGQGE | | Uterine/Endometrium |
| | | TNKNRTKGGWQ | | Cancer, MSI+ |
| | | QKSKGPKKTAKS | | Stomach Cancer, |
| | | KKRNL* (SEQ ID | | Lynch syndrome |
| | | NO: 108) | | |
| SLC35F5 | C248fs; −1 | NIMEIRQLPSSHA | FALCGFWQI (A02.01) (SEQ ID NO: 1148) | MSI+ CRC, MSI+ |
| | | LEAKLSRMSYPV | | Uterine/Endometrium |
| | | KEQESILKTVGKL | | Cancer, MSI+ |
| | | TATQVAKISFFFA | | Stomach Cancer, |
| | | LCGFWQICHIKKH | | Lynch syndrome |
| | | FQTHKLL* (SEQ | | |
| | | ID NO: 109) | | |
| SMAP1 | K172fs; +1 | YEKKKYYDKNAI | | MSI+ CRC, MSI+ |
| | | AITNISSSDAPLQP | | Uterine/Endometrium |
| | | LVSSPSLQAAVD | | Cancer, MSI+ |
| | | KNKLEKEKEKKK | | Stomach Cancer, |
| | | GREKERKGARKA | | Lynch syndrome |
| | | GKTTYS* (SEQ ID | | |
| | | NO: 110) | | |
| SMAP1 | K171fs; −1 | KYEKKKYYDKN | LKKLRSPL (B08.01) (SEQ ID NO: 1149) | MSI+ CRC, MSI+ |
| | | AIAITNISSSDAPL | SLKKVPAL (B08.01) (SEQ ID NO: 1150) | Uterine/Endometrium |
| | | QPLVSSPSLQAAV | RKISNWSLKK (A03.01) (SEQ ID NO: 1151) | Cancer, MSI+ |
| | | DKNKLEKEKEKK | VPALKKLRSPL (B07.02) (SEQ ID NO: 1152) | Stomach Cancer, |
| | | RKRKREKRSQKS | | Lynch syndrome |
| | | RQNHLQLKSCRR | | |
| | | KISNWSLKKVPA | | |
| | | LKKLRSPLWIF* | | |
| | | (SEQ ID NO: 111) | | |
| TFAM | E148fs; +1 | IYQDAYRAEWQV | KRVNTAWKTK (A03.01) (SEQ ID NO: 1153) | MSI+ CRC, MSI+ |
| | | YKEEISRFKEQLT | MTKKKRVNTA (B08.01) (SEQ ID NO: 1154) | Uterine/Endometrium |
| | | PSQIMSLEKEIMD | RVNTAWKTK (A03.01) (SEQ ID NO: 1155) | Cancer, MSI+ |
| | | KHLKRKAMTKK | RVNTAWKTKK (A03.01) (SEQ ID NO: 1156) | Stomach Cancer, |
| | | KRVNTAWKTKK | TKKKRVNTA (B08.01) (SEQ ID NO: 1157) | Lynch syndrome |
| | | TSFSL* (SEQ ID | WKTKKTSFSL (B08.01) (SEQ ID NO: 1158) | |
| | | NO: 112) | | |
| TFAM | E148fs; −1 | IYQDAYRAEWQV | | MSI+ CRC, MSI+ |
| | | YKEEISRFKEQLT | | Uterine/Endometrium |
| | | PSQIMSLEKEIMD | | Cancer, MSI+ |
| | | KHLKRKAMTKK | | Stomach Cancer, |
| | | KS* (SEQ ID NO: | | Lynch syndrome |
| | | 113) | | |
| TGFBR2 | P129fs; +1 | EKPQEVCVAVWR | | MSI+ CRC, MSI+ |
| | | KNDENITLETVCH | | Uterine/Endometrium |
| | | DPKLPYHDFILED | | Cancer, MSI+ |
| | | AASPKCIMKEKK | | Stomach Cancer, |
| | | KAW* (SEQ ID | | Lynch syndrome |
| | | NO: 114) | | |
| TGFBR2 | K128fs; −1 | EKPQEVCVAVWR | ALMSAMTTS (A02.01) (SEQ ID NO: 1159) | MSI+ CRC, MSI+ |
| | | KNDENITLETVCH | AMTTSSSQK (A03.01, A11.01) (SEQ ID NO: 1160) | Uterine/Endometrium |
| | | DPKLPYHDFILED | AMTTSSSQKN (A03.01) (SEQ ID NO: 1161) | Cancer, MSI+ |
| | | AASPKCIMKEKK | CIMKEKKSL (B08.01) (SEQ ID NO: 1162) | Stomach Cancer, |
| | | SLVRLSSCVPVAL | CIMKEKKSLV (B08.01) (SEQ ID NO: 1163) | Lynch syndrome |
| | | MSAMTTSSSQKNI | IMKEKKSL (B08.01) (SEQ ID NO: 1164) | |
| | | TPAILTCC* (SEQ | IMKEKKSLV (B08.01) (SEQ ID NO: 1165) | |
| | | ID NO: 115) | KSLVRLSSCV (A02.01) (SEQ ID NO: 1166) | |
| | | | LVRLSSCVPV (A02.01) (SEQ ID NO: 1167) | |
| | | | RLSSCVPVA (A02.01, A03.01) (SEQ ID NO: 1168) | |
| | | | RLSSCVPVAL (A02.01) (SEQ ID NO: 1169) | |
| | | | SAMTTSSSQK (A03.01, A11.01) (SEQ ID NO: 1170) | |
| | | | SLVRLSSCV (A02.01) (SEQ ID NO: 1171) | |
| | | | VPVALMSAM (B07.02) (SEQ ID NO: 1172) | |
| | | | VRLSSCVPVA (A02.01) (SEQ ID NO: 1173) | |
| THAP5 | K99fs; −1 | VPSKYQFLCSDHF | KMRKKYAQK (A03.01) (SEQ ID NO: 1174) | MSI+ CRC, MSI+ |
| | | TPDSLDIRWGIRY | | Uterine/Endometrium |
| | | LKQTAVPTIFSLP | | Cancer, MSI+ |
| | | EDNQGKDPSKKN | | Stomach Cancer, |
| | | PRRKTWKMRKK | | Lynch syndrome |
| | | YAQKPSQKNHLY | | |
| | | *(SEQ ID NO: 116) | | |
| TTK | R854fs; −1 | GTTEEMKYVLGQ | FVMSDTTYK (A03.01) (SEQ ID NO: 1175) | MSI+ CRC, MSI+ |
| | | LVGLNSPNSILKA | FVMSDTTYKI (A02.01) (SEQ ID NO: 1176) | Uterine/Endometrium |
| | | AKTLYEHYSGGE | KIEEKKGEK (A03.01) (SEQ ID NO: 1177) | Cancer, MSI+ |
| | | SHNSSSSKTFEKK | LFVMSDTTYK (A03.01) (SEQ ID NO: 1178) | Stomach Cancer, |
| | | GEKNDLQLFVMS | MSDTTYKIY (A01.01) (SEQ ID NO: 1179) | Lynch syndrome |
| | | DTTYKIYWTVILL | VMSDTTYKI (A02.01) (SEQ ID NO: 1180) | |
| | | NPCGNLHLKTTSL | VMSDTTYKIY (A01.01) (SEQ ID NO: 1181) | |
| | | *(SEQ ID NO: 117) | | |
| XPOT | F126fs; −1 | QQLIRETLISWLQ | YLTKWPKFFL (A02.01) (SEQ ID NO: 1182) | MSI+ CRC, MSI+ |
| | | AQMLNPQPEKTFI | | Uterine/Endometrium |
| | | RNKAAQVFALLF | | Cancer, MSI+ |
| | | VTEYLTKWPKFF | | Stomach Cancer, |
| | | LTFSQ* (SEQ ID | | Lynch syndrome |
| | | NO: 118) | | |
| TABLE 1C | | FRAMESHIFT¹ | | |
| APC | V1352fs | AKFQQCHSTLEP | FLQERNLPP (A02.01) (SEQ ID NO: 1183) | CRC, LUAD, |
| | F1354fs | NPADCRVLVYLQ | FRRPHSCLA (B08.01) (SEQ ID NO: 1184) | UCEC, STAD |
| | Q1378fs | NQPGTKLLNFLQ | LIVLRVVRL (B08.01) (SEQ ID NO: 1185) | |
| | S1398fs | ERNLPPKVVLRHP | LLSVHLIVL (A02.01, B08.01) (SEQ ID NO: 318) | |
| | | KVHLNTMFRRPH | | |
| | | SCLADVLLSVHLI | | |
| | | VLRVVRLPAPFR | | |
| | | VNHAVEW* (SEQ | | |
| | | ID NO: 44) | | |
| APC | S1421fs | APVIFQIALDKPC | EVKHLHHLL (B08.01) (SEQ ID NO: 1186) | CRC, LUAD, |
| | R1435fs | HQAEVKHLHHLL | HLHHLLKQLK (A03.01) (SEQ ID NO: 1187) | UCEC, STAD |
| | T1438fs | KQLKPSEKYLKIK | HLLLKRERV (B08.01) (SEQ ID NO: 1188) | |
| | P1442fs | HLLLKRERVDLS | KIKHLLLKR (A03.01) (SEQ ID NO: 1189) | |
| | P1443fs | KLQ* (SEQ ID NO: | KPSEKYLKI (B07.02) (SEQ ID NO: 1190) | |
| | V1452fs | 45) | KYLKIKHLL (A24.02) (SEQ ID NO: 1191) | |
| | P1453fs | | KYLKIKHLLL (A24.02) (SEQ ID NO: 1192) | |
| | K1462fs | | LLKQLKPSEK (A03.01) (SEQ ID NO: 1193) | |
| | E1464fs | | LLKRERVDL (B08.01) (SEQ ID NO: 1194) | |
| | | | LLLKRERVDL (B08.01) (SEQ ID NO: 1195) | |
| | | | QLKPSEKYLK (A03.01) (SEQ ID NO: 1196) | |
| | | | YLKIKHLLL (A02.01, B08.01) (SEQ ID NO: 1197) | |
| | | | YLKIKHLLLK (A03.01) (SEQ ID NO: 1198) | |
| APC | T1487fs | MLQFRGSRFFQM | ILPRKVLQM (B08.01) (SEQ ID NO: 1199) | CRC, LUAD, |
| | H1490fs | LILYYILPRKVLQ | KVLQMDFLV (A02.01, A24.02) (SEQ ID NO: 1200) | UCEC, STAD |
| | L1488fs | MDFLVHPA* (SEQ | LPRKVLQMDF (B07.02, B08.01) (SEQ ID NO: 1201) | |
| | | ID NO: 46) | LQMDFLVHPA (A02.01) (SEQ ID NO: 1202) | |
| | | | QMDFLVHPA (A02.01) (SEQ ID NO: 1203) | |
| | | | YILPRKVLQM (A02.01, B08.01) (SEQ ID NO: 1204) | |
| ARID1A | Q1306fs | ALGPHSRISCLPT | APSPASRLQC (B07.02) (SEQ ID NO: 1205) | STAD, UCEC, |
| | S1316fs | QTRGCILLAATPR | HPLAPMPSKT (B07.02) (SEQ ID NO: 1206) | BLCA, BRCA, |
| | Y1324fs | SSSSSSSNDMIPM | ILPLPQLLL (A02.01) (SEQ ID NO: 1207) | LUSC, CESC, |
| | T1348fs | AISSPPKAPLLAA | LLLSADQQA (A02.01) (SEQ ID NO: 1208) | KIRC, UCS |
| | G1351fs | PSPASRLQCINSN | LPTQTRGCI (B07.02) (SEQ ID NO: 1209) | |
| | G1378fs | SRITSGQWMAHM | LPTQTRGCIL (B07.02) (SEQ ID NO: 1210) | |
| | P1467fs | ALLPSGTKGRCT | RISCLPTQTR (A03.01) (SEQ ID NO: 1211) | |
| | | ACHTALGRGSLSS | SLAETVSLH (A03.01) (SEQ ID NO: 1212) | |
| | | SSCPQPSPSLPASN | TPRSSSSSS (B07.02) (SEQ ID NO: 1213) | |
| | | KLPSLPLSKMYTT | TPRSSSSSSS (B07.02) (SEQ ID NO: 1214) | |
| | | SMAMPILPLPQLL | | |
| | | LSADQQAAPRTN | | |
| | | FHSSLAETVSLHP | | |
| | | LAPMPSKTCHHK | | |
| | | * (SEQ ID NO: 47) | | |
| ARID1A | S674fs | AHQGFPAAKESR | ALPPVLLSL (A02.01) (SEQ ID NO: 1215) | STAD, UCEC, |
| | P725fs | VIQLSLLSLLIPPL | ALPPVLLSLA (A02.01) (SEQ ID NO: 1216) | BLCA, BRCA, |
| | R727fs | TCLASEALPRPLL | ALPRPLLAL (A02.01) (SEQ ID NO: 1217) | LUSC, CESC, |
| | I736fs | ALPPVLLSLAQDH | ASRTASCIL (B07.02) (SEQ ID NO: 1218) | KIRC, UCS |
| | | SRLLQCQATRCH | EALPRPLLAL (B08.01) (SEQ ID NO: 1219) | |
| | | LGHPVASRTASCI | HLGHPVASR (A03.01) (SEQ ID NO: 1220) | |
| | | LP* (SEQ ID NO: | HPVASRTAS (B07.02) (SEQ ID NO: 1221) | |
| | | 48) | HPVASRTASC (B07.02) (SEQ ID NO: 1222) | |
| | | | IIQLSLLSLL (A02.01) (SEQ ID NO: 1223) | |
| | | | IQLSLLSLL (A02.01) (SEQ ID NO: 1224) | |
| | | | IQLSLLSLLI (A02.01, A24.02) (SEQ ID NO: 1225) | |
| | | | LLALPPVLL (A02.01) (SEQ ID NO: 1226) | |
| | | | LLIPPLTCL (A02.01) (SEQ ID NO: 1227) | |
| | | | LLIPPLTCLA (A02.01) (SEQ ID NO: 1228) | |
| | | | LLSLLIPPL (A02.01) (SEQ ID NO: 1229) | |
| | | | LLSLLIPPLT (A02.01) (SEQ ID NO: 1230) | |
| | | | LPRPLLALPP (B07.02) (SEQ ID NO: 1231) | |
| | | | QLSLLSLLI (A02.01) (SEQ ID NO: 1232) | |
| | | | RLLQCQATR (A03.01) (SEQ ID NO: 1233) | |
| | | | RPLLALPPV (B07.02) (SEQ ID NO: 1234) | |
| | | | RPLLALPPVL (B07.02) (SEQ ID NO: 1235) | |
| | | | SLAQDHSRL (A02.01) (SEQ ID NO: 1236) | |
| | | | SLAQDHSRLL (A02.01) (SEQ ID NO: 1237) | |
| | | | SLLIPPLTCL (A02.01) (SEQ ID NO: 1238) | |
| | | | SLLSLLIPP (A02.01) (SEQ ID NO: 1239) | |
| | | | SLLSLLIPPL (A02.01, B08.01) (SEQ ID NO: 1240) | |
| ARID1A | G414fs | PILAATGTSVRTA | AAATSAASTL (B07.02) (SEQ ID NO: 1241) | STAD, UCEC, |
| | Q473fs | ARTWVPRAAIRV | AAIPASTSAV (B07.02) (SEQ ID NO: 1242) | BLCA, BRCA, |
| | H477fs | PDPAAVPDDHAG | AIPASTSAV (A02.01) (SEQ ID NO: 1243) | LUSC, CESC, |
| | S499fs | PGAECHGRPLLY | ALPAGCVSSA (A02.01) (SEQ ID NO: 1244) | KIRC, UCS |
| | P504fs | TADSSLWTTRPQ | APLLTATGSV (B07.02) (SEQ ID NO: 1245) | |
| | Q548fs | RVWSTGPDSILQP | APVLSASIL (B07.02) (SEQ ID NO: 1246) | |
| | P549fs | AKSSPSAAAATLL | ATLLPATTV (A02.01) (SEQ ID NO: 1247) | |
| | | PATTVPDPSCPTF | ATVSTTTAPV (A02.01) (SEQ ID NO: 1248) | |
| | | VSAAATVSTTTAP | AVPANCLFPA (A02.01) (SEQ ID NO: 1249) | |
| | | VLSASILPAAIPAS | CLFPAALPST (A02.01) (SEQ ID NO: 1250) | |
| | | TSAVPGSIPLPAV | CPTFVSAAA (B07.02) (SEQ ID NO: 1251) | |
| | | DDTAAPPEPAPLL | FPAALPSTA (B07.02) (SEQ ID NO: 1252) | |
| | | TATGSVSLPAAAT | FPAALPSTAG (B07.02) (SEQ ID NO: 1253) | |
| | | SAASTLDALPAG | GAECHGRPL (B07.02) (SEQ ID NO: 1254) | |
| | | CVSSAPVSAVPA | GAISRFIWV (A02.01) (SEQ ID NO: 1255) | |
| | | NCLFPAALPSTAG | ILPAAIPAST (A02.01) (SEQ ID NO: 1256) | |
| | | AISRFIWVSGILSP | IWVSGILSPL (A24.02) (SEQ ID NO: 1257) | |
| | | LNDLQ* (SEQ ID | LLTATGSVSL (A02.01) (SEQ ID NO: 1258) | |
| | | NO: 49) | LLYTADSSL (A02.01) (SEQ ID NO: 1259) | |
| | | | LPAAATSAA (B07.02) (SEQ ID NO: 1260) | |
| | | | LPAAATSAAS (B07.02) (SEQ ID NO: 1261) | |
| | | | LPAAIPAST (B07.02) (SEQ ID NO: 1262) | |
| | | | LPAGCVSSA (B07.02) (SEQ ID NO: 1263) | |
| | | | LPAGCVSSAP (B07.02) (SEQ ID NO: 1264) | |
| | | | LYTADSSLW (A24.02) (SEQ ID NO: 1265) | |
| | | | QPAKSSPSA (B07.02) (SEQ ID NO: 1266) | |
| | | | QPAKSSPSAA (B07.02) (SEQ ID NO: 1267) | |
| | | | RFIWVSGIL (A24.02) (SEQ ID NO: 1268) | |
| | | | RPQRVWSTG (B07.02) (SEQ ID NO: 1269) | |
| | | | RVWSTGPDSI (A02.01) (SEQ ID NO: 1270) | |
| | | | SAVPGSIPL (B07.02) (SEQ ID NO: 1271) | |
| | | | SILPAAIPA (A02.01) (SEQ ID NO: 1272) | |
| | | | SLPAAATSA (A02.01) (SEQ ID NO: 1273) | |
| | | | SLPAAATSAA (A02.01) (SEQ ID NO: 1274) | |
| | | | SLWTTRPQR (A03.01) (SEQ ID NO: 1275) | |
| | | | SLWTTRPQRV (A02.01) (SEQ ID NO: 1276) | |
| | | | SPSAAAATL (B07.02) (SEQ ID NO: 1277) | |
| | | | SPSAAAATLL (B07.02) (SEQ ID NO: 1278) | |
| | | | TLDALPAGCV (A02.01) (SEQ ID NO: 1279) | |
| | | | TVSTTTAPV (A02.01) (SEQ ID NO: 1280) | |
| | | | VLSASILPA (A02.01) (SEQ ID NO: 1281) | |
| | | | VLSASILPAA (A02.01) (SEQ ID NO: 1282) | |
| | | | VPANCLFPA (B07.02) (SEQ ID NO: 1283) | |
| | | | VPANCLFPAA (B07.02) (SEQ ID NO: 1284) | |
| | | | VPDPSCPTF (B07.02) (SEQ ID NO: 1285) | |
| | | | VPGSIPLPA (B07.02) (SEQ ID NO: 1286) | |
| | | | VPGSIPLPAV (B07.02) (SEQ ID NO: 1287) | |
| | | | WVSGILSPL (A02.01) (SEQ ID NO: 1288) | |
| | | | YTADSSLWTT (A02.01) (SEQ ID NO: 1289) | |
| ARID1A | T433fs | PCRAGRRVPWAA | APAGMVNRA (B07.02) (SEQ ID NO: 1290) | STAD, UCEC, |
| | A441fs | SLIHSRFLLMDNK | ASLHRRSYL (B08.01) (SEQ ID NO: 1291) | BLCA, BRCA, |
| | Y447fs | APAGMVNRARLH | ASLHRRSYLK (A03.01) (SEQ ID NO: 1292) | LUSC, CESC, |
| | P483fs | ITTSKVLTLSSSSH | FLLMDNKAPA (A02.01) (SEQ ID NO: 1293) | KIRC, UCS |
| | P484fs | PTPSNHRPRPLMP | HPRRSPSRL (B07.02, B08.01) (SEQ ID NO: 1294) | |
| | P504fs | NLRISSSHSLNHH | HPSLHISSP (B07.02) (SEQ ID NO: 1295) | |
| | S519fs | SSSPLSLHTPSSHP | HRRSYLKIHL (B08.01) (SEQ ID NO: 1296) | |
| | H544fs | SLHISSPRLHTPPS | HSRFLLMDNK (A03.01) (SEQ ID NO: 1297) | |
| | P549fs | SRRHSSTPRASPP | KLPIPSSASL (A02.01) (SEQ ID NO: 1298) | |
| | P554fs | THSHRLSLLTSSS | KVLTLSSSSH (A03.01) (SEQ ID NO: 1299) | |
| | Q563fs | NLSSQHPRRSPSR | LIHSRFLLM (B08.01) (SEQ ID NO: 1300) | |
| | | LRILSPSLSSPSKL | LLMDNKAPA (A02.01) (SEQ ID NO: 1301) | |
| | | PIPSSASLHRRSYL | LMDNKAPAGM (A02.01) (SEQ ID NO: 1302) | |
| | | KIHLGLRHPQPPQ | LPIPSSASL (B07.02) (SEQ ID NO: 1303) | |
| | | * (SEQ ID NO: 50) | MPNLRISSS (B07.02, B08.01) (SEQ ID NO: 1304) | |
| | | | MPNLRISSSH (B07.02) (SEQ ID NO: 1305) | |
| | | | NLRISSSHSL (B07.02, B08.01) (SEQ ID NO: 1306) | |
| | | | PPTHSHRLSL (B07.02) (SEQ ID NO: 1307) | |
| | | | RAGRRVPWAA (B08.01) (SEQ ID NO: 1308) | |
| | | | RARLHITTSK (A03.01) (SEQ ID NO: 1309) | |
| | | | RISSSHSLNH (A03.01) (SEQ ID NO: 1310) | |
| | | | RLHTPPSSR (A03.01) (SEQ ID NO: 1311) | |
| | | | RLHTPPSSRR (A03.01) (SEQ ID NO: 1312) | |
| | | | RLRILSPSL (A02.01, B07.02, B08.01) (SEQ ID NO: | |
| | | | 1313) | |
| | | | RPLMPNLRI (B07.02) (SEQ ID NO: 1314) | |
| | | | RPRPLMPNL (B07.02) (SEQ ID NO: 1315) | |
| | | | SASLHRRSYL (B07.02, B08.01) (SEQ ID NO: 1316) | |
| | | | SLHISSPRL (A02.01) (SEQ ID NO: 1317) | |
| | | | SLHRRSYLK (A03.01) (SEQ ID NO: 1318) | |
| | | | SLHRRSYLKI (B08.01) (SEQ ID NO: 1319) | |
| | | | SLIHSRFLL (A02.01) (SEQ ID NO: 1320) | |
| | | | SLIHSRFLLM (A02.01, B08.01) (SEQ ID NO: 1321) | |
| | | | SLLTSSSNL (A02.01) (SEQ ID NO: 1322) | |
| | | | SLNHHSSSPL (A02.01, B07.02, B08.01) (SEQ ID NO: | |
| | | | 1323) | |
| | | | SLSSPSKLPI (A02.01) (SEQ ID NO: 1324) | |
| | | | SPLSLHTPS (B07.02) (SEQ ID NO: 1325) | |
| | | | SPLSLHTPSS (B07.02) (SEQ ID NO: 1326) | |
| | | | SPPTHSHRL (B07.02) (SEQ ID NO: 1327) | |
| | | | SPRLHTPPS (B07.02) (SEQ ID NO: 1328) | |
| | | | SPRLHTPPSS (B07.02) (SEQ ID NO: 1329) | |
| | | | SPSLSSPSKL (B07.02) (SEQ ID NO: 1330) | |
| | | | SYLKIHLGL (A24.02) (SEQ ID NO: 1331) | |
| | | | TPSNHRPRPL (B07.02, B08.01) (SEQ ID NO: 1332) | |
| | | | TPSSHPSLHI (B07.02) (SEQ ID NO: 1333) | |
| ARID1A | A2137fs | RTNPTVRMRPHC | CVPFWTGRIL (B07.02) (SEQ ID NO: 1334) | STAD, UCEC, |
| | P2139fs | VPFWTGRILLPSA | HCVPFWTGRIL (B07.02) (SEQ ID NO: 1335) | BLCA, BRCA, |
| | L1970fs | ASVCPIPFEACHL | ILLPSAASV (A02.01) (SEQ ID NO: 1336) | LUSC, CESC, |
| | V1994fs | CQAMTLRCPNTQ | ILLPSAASVC (A02.01) (SEQ ID NO: 1337) | KIRC, UCS |
| | | GCCSSWAS* (SEQ | LLPSAASVCPI (A02.01) (SEQ ID NO: 1338) | |
| | | ID NO: 51) | LPSAASVCPI (B07.02) (SEQ ID NO: 1339) | |
| | | | MRPHCVPF (B08.01) (SEQ ID NO: 1340) | |
| | | | RILLPSAASV (A02.01) (SEQ ID NO: 1341) | |
| | | | RMRPHCVPF (A24.02, B07.02, B08.01) (SEQ ID NO: | |
| | | | 1342) | |
| | | | RMRPHCVPFW (A24.02) (SEQ ID NO: 1343) | |
| | | | RTNPTVRMR (A03.01) (SEQ ID NO: 1344) | |
| | | | SVCPIPFEA (A02.01) (SEQ ID NO: 1345) | |
| | | | TVRMRPHCV (B08.01) (SEQ ID NO: 1346) | |
| | | | TVRMRPHCVPF (B08.01) (SEQ ID NO: 1347) | |
| | | | VPFWTGRIL (B07.02) (SEQ ID NO: 1348) | |
| | | | VPFWTGRILL (B07.02) (SEQ ID NO: 1349) | |
| | | | VRMRPHCVPF (B08.01) (SEQ ID NO: 1350) | |
| ARID1A | N756fs | TNQALPKIEVICR | AMVPRGVSM (B07.02, B08.01) (SEQ ID NO: 1351) | STAD, UCEC, |
| | S764fs | GTPRCPSTVPPSP | AMVPRGVSMA (A02.01) (SEQ ID NO: 1352) | BLCA, BRCA, |
| | T783fs | AQPYLRVSLPEDR | AWAPTSRTPW (A24.02) (SEQ ID NO: 1353) | LUSC, CESC, |
| | Q799fs | YTQAWAPTSRTP | CPMPTTPVQA (B07.02) (SEQ ID NO: 1354) | KIRC, UCS |
| | A817fs | WGAMVPRGVSM | CPSTVPPSPA (B07.02) (SEQ ID NO: 1355) | |
| | | AHKVATPGSQTI | GAMVPRGVSM (B07.02, B08.01) (SEQ ID NO: 1356) | |
| | | MPCPMPTTPVQA | MPCPMPTTPV (B07.02) (SEQ ID NO: 1357) | |
| | | WLEA* (SEQ ID | MPTTPVQAW (B07.02) (SEQ ID NO: 1358) | |
| | | NO: 52) | MPTTPVQAWL (B07.02) (SEQ ID NO: 1359) | |
| | | | SLPEDRYTQA (A02.01) (SEQ ID NO: 1360) | |
| | | | SPAQPYLRV (B07.02) (SEQ ID NO: 1361) | |
| | | | SPAQPYLRVS (B07.02) (SEQ ID NO: 1362) | |
| | | | TIMPCPMPT (A02.01) (SEQ ID NO: 1363) | |
| | | | TPVQAWLEA (B07.02) (SEQ ID NO: 1364) | |
| | | | TSRTPWGAM (B07.02) (SEQ ID NO: 1365) | |
| | | | VPPSPAQPYL (B07.02) (SEQ ID NO: 1366) | |
| | | | VPRGVSMAH (B07.02) (SEQ ID NO: 1367) | |
| β2M | N62fs | RMERELKKWSIQ | CLSARTGLSI (B08.01) (SEQ ID NO: 1368) | CRC, STAD, |
| | E67fs | TCLSARTGLSISC | CTTLNSPPLK (A03.01) (SEQ ID NO: 1369) | SKCM, HNSC |
| | L74fs | TTLNSPPLKKMS | GLSISCTTL (A02.01) (SEQ ID NO: 1370) | |
| | F82fs | MPAV* (SEQ ID | SPPLKKMSM (B07.02, B08.01) (SEQ ID NO: 1371) | |
| | T91fs | NO: 53) | TLNSPPLKK (A03.01) (SEQ ID NO: 1372) | |
| | E94fs | | TTLNSPPLK (A03.01) (SEQ ID NO: 1373) | |
| | | | TTLNSPPLKK (A03.01) (SEQ ID NO: 1374) | |
| β2M | L13fs | LCSRYSLFLAWR | LQRFRFTHV (B08.01) (SEQ ID NO: 1375) | CRC, STAD, |
| | S14fs | LSSVLQRFRFTHV | LQRFRFTHVI (B08.01) (SEQ ID NO: 1376) | SKCM, HNSC |
| | | IQQRMESQIS* | RLSSVLQRF (A24.02) (SEQ ID NO: 1377) | |
| | | (SEQ ID NO: 54) | RLSSVLQRFR (A03.01) (SEQ ID NO: 1378) | |
| | | | VLQRFRFTHV (A02.01, B08.01) (SEQ ID NO: 1379) | |
| CDH1 | A691fs | RSACVTVKGPLA | ASVGRHSLSK (A03.01) (SEQ ID NO: 1380) | ILC LumA Breast |
| | P708fs | SVGRHSLSKQDC | KFLPFWGFL (A24.02) (SEQ ID NO: 1381) | Cancer |
| | L711fs | KFLPFWGFLEEFL | LASVGRHSL (B07.02) (SEQ ID NO: 1382) | |
| | | LC* (SEQ ID NO: | LPFWGFLEEF (B07.02) (SEQ ID NO: 1383) | |
| | | 55) | PFWGFLEEF (A24.02) (SEQ ID NO: 1384) | |
| | | | SVGRHSLSK (A03.01) (SEQ ID NO: 1385) | |
| CDH1 | H121fs | IQWGTTTAPRPIR | APRPIRPPF (B07.02) (SEQ ID NO: 1386) | ILC LumA Breast |
| | P126fs | PPFLESKQNCSHF | APRPIRPPFL (B07.02) (SEQ ID NO: 1387) | Cancer |
| | H128fs | PTPLLASEDRRET | AQKMKKAHFL (B08.01) (SEQ ID NO: 1388) | |
| | N144fs | GLFLPSAAQKMK | FLPSAAQKM (A02.01) (SEQ ID NO: 1389) | |
| | V157fs | KAHFLKTWFRSN | GLFLPSAAQK (A03.01) (SEQ ID NO: 1390) | |
| | P159fs | PTKTKKARFSTAS | HPLLVSLLL (B07.02) (SEQ ID NO: 1391) | |
| | N166fs | LAKELTHPLLVSL | KAHFLKTWFR (A03.01) (SEQ ID NO: 1392) | |
| | N181fs | LLKEKQDG* (SEQ | KARFSTASL (B07.02) (SEQ ID NO: 1393) | |
| | F189fs | ID NO: 56) | KMKKAHFLK (A03.01) (SEQ ID NO: 1394) | |
| | P201fs | | KTWFRSNPTK (A03.01) (SEQ ID NO: 1395) | |
| | F205fs | | LAKELTHPL (B07.02, B08.01) (SEQ ID NO: 1396) | |
| | | | LAKELTHPLL (B08.01) (SEQ ID NO: 1397) | |
| | | | NPTKTKKARF (B07.02) (SEQ ID NO: 1398) | |
| | | | QKMKKAHFL (B08.01) (SEQ ID NO: 1399) | |
| | | | RFSTASLAK (A03.01) (SEQ ID NO: 1400) | |
| | | | RPIRPPFLES (B07.02) (SEQ ID NO: 1401) | |
| | | | RSNPTKTKK (A03.01) (SEQ ID NO: 1402) | |
| | | | SLAKELTHPL (A02.01, B08.01) (SEQ ID NO: 1403) | |
| | | | TKKARFSTA (B08.01) (SEQ ID NO: 1404) | |
| CDH1 | V114fs | PTDPFLGLRLGLH | GLRFWNPSR (A03.01) (SEQ ID NO: 1405) | ILC LumA Breast |
| | P127fs | LQKVFHQSHAEY | ISQLLSWPQK (A03.01) (SEQ ID NO: 1406) | Cancer |
| | V132fs | SGAPPPPPAPSGL | RIAHISQLL (A02.01) (SEQ ID NO: 1407) | |
| | P160fs | RFWNPSRIAHISQ | RLGYSSHQL (A02.01) (SEQ ID NO: 1408) | |
| | | LLSWPQKTEERL | SQLLSWPQK (A03.01) (SEQ ID NO: 1409) | |
| | | GYSSHQLPRK* | SRIAHISQL (B08.01) (SEQ ID NO: 1410) | |
| | | (SEQ ID NO: 57) | WPQKTEERL (B07.02) (SEQ ID NO: 1411) | |
| | | | YSSHQLPRK (A03.01) (SEQ ID NO: 1412) | |
| CDH1 | L731fs | FCCSCCFFGGER | CPQRMTPGTT (B07.02) (SEQ ID NO: 1413) | ILC LumA Breast |
| | R749fs | WSKSPYCPQRMT | EAEKRTRTL (B08.01) (SEQ ID NO: 1414) | Cancer |
| | E757fs | PGTTFITMMKKE | GTTFITMMK (A03.01) (SEQ ID NO: 1415) | |
| | G759fs | AEKRTRTLT* | GTTFITMMKK (A03.01) (SEQ ID NO: 1416) | |
| | | (SEQ ID NO: 58) | ITMMKKEAEK (A03.01) (SEQ ID NO: 1417) | |
| | | | RMTPGTTFI (A02.01) (SEQ ID NO: 1418) | |
| | | | SPYCPQRMT (B07.02) (SEQ ID NO: 1419) | |
| | | | TMMKKEAEK (A03.01) (SEQ ID NO: 1420) | |
| | | | TPGTTFITM (B07.02) (SEQ ID NO: 1421) | |
| | | | TPGTTFITMM (B07.02) (SEQ ID NO: 1422) | |
| | | | TTFITMMKK (A03.01) (SEQ ID NO: 1423) | |
| CDH1 | S19fs | WRRNCKAPVSLR | CPGATWREA (B07.02) (SEQ ID NO: 1424) | ILC LumA Breast |
| | E24fs | KSVQTPARSSPAR | CPGATWREAA (B07.02) (SEQ ID NO: 1425) | Cancer |
| | S36fs | PDRTRRLPSLGVP | RSRCPGATWR (A03.01) (SEQ ID NO: 1426) | |
| | | GQPWALGAAASR | TPRATRSRC (B07.02) (SEQ ID NO: 1427) | |
| | | RCCCCCRSPLGSA | | |
| | | RSRSPATLALTPR | | |
| | | ATRSRCPGATWR | | |
| | | EAASWAE* (SEQ | | |
| | | ID NO: 59) | | |
| GATA3 | P394fs | PGRPLQTHVLPEP | HVLPEPHLAL (B07.02) (SEQ ID NO: 1428) | Breast Cancer |
| | P387fs | HLALQPLQPHAD | RPLQTHVLPE (B07.02) (SEQ ID NO: 1429) | |
| | S398fs | HAHADAPAIQPV | VLWTTPPLQH (A03.01) (SEQ ID NO: 1430) | |
| | H400fs | LWTTPPLQHGHR | | |
| | M401fs | HGLEPCSMLTGPP | | |
| | S408fs | ARVPAVPFDLHF | | |
| | P409fs | CRSSIMKPKRDG | | |
| | S408fs | YMFLKAESKIMF | | |
| | P409fs | ATLQRSSLWCLC | | |
| | T419fs | SNH* (SEQ ID NO: | | |
| | H424fs | 60) | | |
| | P425fs | | | |
| | S427fs | | | |
| | F431fs | | | |
| | S430fs | | | |
| | H434fs | | | |
| | H435fs | | | |
| | S438fs | | | |
| | M443fs | | | |
| | G444fs | | | |
| | *445fs | | | |
| GATA3 | P426fs | PRPRRCTRHPACP | APSESPCSPF (B07.02) (SEQ ID NO: 1431) | Breast Cancer |
| | H434fs | LDHTTPPAWSPP | CPLDHTTPPA (B07.02) (SEQ ID NO: 1432) | |
| | P433fs | WVRALLDAHRAP | FLQEQYHEA (A02.01, B08.01) (SEQ ID NO: 1433) | |
| | T441fs | SESPCSPFRLAFL | RLAFLQEQYH (A03.01) (SEQ ID NO: 1434) | |
| | | QEQYHEA* (SEQ | SPCSPFRLAF (B07.02) (SEQ ID NO: 1435) | |
| | | ID NO: 61) | SPPWVRALL (B07.02) (SEQ ID NO: 1436) | |
| | | | YPACPLDHTT (B07.02) (SEQ ID NO: 1437) | |
| MLL2 | P519fs | TRRCHCCPHLRS | ALHLRSCPC (B08.01) (SEQ ID NO: 1438) | STAD, BLCA, |
| | E524fs | HPCPHHLRNHPRP | CLHHRRHLV (B08.01) (SEQ ID NO: 1439) | CRC, HNSC, |
| | P647fs | HHLRHHACHHHL | CLHHRRHLVC (B08.01) (SEQ ID NO: 1440) | BRCA |
| | S654fs | RNCPHPHFLRHCT | CLHRKSHPHL (B08.01) (SEQ ID NO: 1441) | |
| | L656fs | CPGRWRNRPSLR | CLRSHACPP (B08.01) (SEQ ID NO: 1442) | |
| | R755fs | RLRSLLCLPHLNH | CLRSHTCPP (B08.01) (SEQ ID NO: 1443) | |
| | L761fs | HLFLHWRSRPCL | CLWCHACLH (A03.01) (SEQ ID NO: 1444) | |
| | Q773fs | HRKSHPHLLHLR | CPHHLKNHL (B07.02) (SEQ ID NO: 1445) | |
| | | RLYPHHLKHRPC | CPHHLKNLL (B07.02) (SEQ ID NO: 1446) | |
| | | PHHLKNLLCPRH | CPHHLRTRL (B07.02, B08.01) (SEQ ID NO: 1447) | |
| | | LRNCPLPRHLKHL | CPLHLRSLPF (B07.02, B08.01) (SEQ ID NO: 1448) | |
| | | ACLHHLRSHPCPL | CPLPRHLKHL (B07.02, B08.01) (SEQ ID NO: 1449) | |
| | | HLKSHPCLHHRR | CPLSLRSHPC (B07.02) (SEQ ID NO: 1450) | |
| | | HLVCSHHLKSLL | CPRHLRNCPL (B07.02, B08.01) (SEQ ID NO: 1451) | |
| | | CPLHLRSLPFPHH | FPHHLRHHA (B07.02, B08.01) (SEQ ID NO: 1452) | |
| | | LRHHACPHHLRT | FPHHLRHHAC (B07.02, B08.01) (SEQ ID NO: 1453) | |
| | | RLCPHHLKNHLC | GLRSRTCPP (B08.01) (SEQ ID NO: 1454) | |
| | | PPHLRYRAYPPCL | HACLHRLRNL (B08.01) (SEQ ID NO: 1455) | |
| | | WCHACLHRLRNL | HLACLHHLR (A03.01) (SEQ ID NO: 1456) | |
| | | PCPHRLRSLPRPL | HLCPPHLRY (A03.01) (SEQ ID NO: 1457) | |
| | | HLRLHASPHHLR | HLCPPHLRYR (A03.01) (SEQ ID NO: 1458) | |
| | | TPPHPHHLRTHLL | HLKHLACLH (A03.01) (SEQ ID NO: 1459) | |
| | | PHHRRTRSCPCR | HLKHRPCPH (B08.01) (SEQ ID NO: 1460) | |
| | | WRSHPCCHYLRS | HLKNHLCPP (B08.01) (SEQ ID NO: 1461) | |
| | | RNSAPGPRGRTC | HLKSHPCLH (A03.01) (SEQ ID NO: 1462) | |
| | | HPGLRSRTCPPGL | HLKSLLCPL (A02.01, B08.01) (SEQ ID NO: 1463) | |
| | | RSHTYLRRLRSHT | HLLHLRRLY (A03.01) (SEQ ID NO: 1464) | |
| | | CPPSLRSHAYALC | HLRNCPLPR (A03.01) (SEQ ID NO: 1465) | |
| | | LRSHTCPPRLRDH | HLRNCPLPRH (A03.01) (SEQ ID NO: 1466) | |
| | | ICPLSLRNCTCPPR | HLRRLYPHHL (B08.01) (SEQ ID NO: 1467) | |
| | | LRSRTCLLCLRSH | HLRSHPCPL (B07.02, B08.01) (SEQ ID NO: 1468) | |
| | | ACPPNLRNHTCPP | HLRSHPCPLH (A03.01) (SEQ ID NO: 1469) | |
| | | SLRSHACPPGLRN | HLRSLPFPH (A03.01) (SEQ ID NO: 1470) | |
| | | RICPLSLRSHPCPL | HLRTRLCPH (A03.01, B08.01) (SEQ ID NO: 1471) | |
| | | GLKSPLRSQANA | HLVCSHHLK (A03.01) (SEQ ID NO: 1472) | |
| | | LHLRSCPCSLPLG | HPCLHHRRHL (B07.02, B08.01) (SEQ ID NO: 1473) | |
| | | NHPYLPCLESQPC | HPGLRSRTC (B07.02) (SEQ ID NO: 1474) | |
| | | LSLGNHLCPLCPR | HPHLLHLRRL (B07.02, B08.01) (SEQ ID NO: 1475) | |
| | | SCRCPHLGSHPCR | HRKSHPHLL (B08.01) (SEQ ID NO: 1476) | |
| | | LS* (SEQ ID NO: | HRRTRSCPC (B08.01) (SEQ ID NO: 1477) | |
| | | 62) | KSHPHLLHLR (A03.01) (SEQ ID NO: 1478) | |
| | | | KSLLCPLHLR (A03.01) (SEQ ID NO: 1479) | |
| | | | LLCPLHLRSL (A02.01, B08.01) (SEQ ID NO: 1480) | |
| | | | LLHLRRLYPH (B08.01) (SEQ ID NO: 1481) | |
| | | | LPRHLKHLA (B07.02) (SEQ ID NO: 1482) | |
| | | | LPRHLKHLAC (B07.02, B08.01) (SEQ ID NO: 1483) | |
| | | | LRRLRSHTC (B08.01) (SEQ ID NO: 1484) | |
| | | | LRRLYPHHL (B08.01) (SEQ ID NO: 1485) | |
| | | | LVCSHHLKSL (B08.01) (SEQ ID NO: 1486) | |
| | | | NLRNHTCPPS (B08.01) (SEQ ID NO: 1487) | |
| | | | PLHLRSLPF (B08.01) (SEQ ID NO: 1488) | |
| | | | RLCPHHLKNH (A03.01) (SEQ ID NO: 1489) | |
| | | | RLYPHHLKH (A03.01) (SEQ ID NO: 1490) | |
| | | | RLYPHHLKHR (A03.01) (SEQ ID NO: 1491) | |
| | | | RPCPHHLKNL (B07.02) (SEQ ID NO: 1492) | |
| | | | RSHPCPLHLK (A03.01) (SEQ ID NO: 1493) | |
| | | | RSLPFPHHLR (A03.01) (SEQ ID NO: 1494) | |
| | | | RTRLCPHHL (B07.02) (SEQ ID NO: 1495) | |
| | | | RTRLCPHHLK (A03.01) (SEQ ID NO: 1496) | |
| | | | SLLCPLHLR (A03.01) (SEQ ID NO: 1497) | |
| | | | SLRSHACPP (B08.01) (SEQ ID NO: 1498) | |
| | | | SPLRSQANA (B07.02) (SEQ ID NO: 1499) | |
| | | | YLRRLRSHT (B08.01) (SEQ ID NO: 1500) | |
| | | | YPHHLKHRPC (B07.02, B08.01) (SEQ ID NO: 1501) | |
| PTEN | I122fs | SWKGTNWCNDM | FITSGQIFK (A03.01) (SEQ ID NO: 1502) | UCEC, PRAD, |
| | I135fs | CIFITSGQIFKGTR | IFITSGQIF (A24.02) (SEQ ID NO: 1503) | SKCM, STAD, |
| | A148fs | GPRFLWGSKDQR | SQSEALCVL (A02.01) (SEQ ID NO: 1504) | BRCA, LUSC, |
| | L152fs | QKGSNYSQSEAL | SQSEALCVLL (A02.01) (SEQ ID NO: 1505) | KIRC, LIHC, |
| | D162fs | CVLL* (SEQ ID | | KIRP, GBM |
| | I168fs | NO: 63) | | |
| PTEN | L265fs | KRTKCFTFG* | | UCEC, PRAD, |
| | K266fs | (SEQ ID NO: 64) | | SKCM, STAD, |
| | | | | BRCA, LUSC, |
| | | | | KIRC, LIHC, |
| | | | | KIRP, GBM |
| PTEN | A39fs | PIFIQTLLLWDFL | AYTGTILMM (A24.02) (SEQ ID NO: 1506) | UCEC, PRAD, |
| | E40fs | QKDLKAYTGTIL | DLKAYTGTIL (B08.01) (SEQ ID NO: 1507) | SKCM, STAD, |
| | V45fs | MM* (SEQ ID NO: | | BRCA, LUSC, |
| | R47fs | 65) | | KIRC, LIHC, |
| | N48fs | | | KIRP, GBM |
| PTEN | T319fs | QKMILTKQIKTKP | ILTKQIKTK (A03.01) (SEQ ID NO: 1508) | UCEC, PRAD, |
| | T321fs | TDTFLQILR* (SEQ | KMILTKQIK (A03.01) (SEQ ID NO: 1509) | SKCM, STAD, |
| | K327fs | ID NO: 66) | KPTDTFLQI (B07.02) (SEQ ID NO: 1510) | BRCA, LUSC, |
| | A328fs | | KPTDTFLQIL (B07.02) (SEQ ID NO: 1511) | KIRC, LIHC, |
| | A333fs | | MILTKQIKTK (A03.01) (SEQ ID NO: 1512) | KIRP, GBM |
| PTEN | N63fs | GFWIQSIKTITRYT | ITRYTIFVLK (A03.01) (SEQ ID NO: 1513) | UCEC, PRAD, |
| | E73fs | IFVLKDIMTPPNLI | LIAELHNIL (A02.01) (SEQ ID NO: 1514) | SKCM, STAD, |
| | A86fs | AELHNILLKTITH | LIAELHNILL (A02.01) (SEQ ID NO: 1515) | BRCA, LUSC, |
| | N94fs | HS* (SEQ ID NO: | MTPPNLIAEL (A02.01) (SEQ ID NO: 1516) | KIRC, LIHC, |
| | | 67) | NLIAELHNI (A02.01) (SEQ ID NO: 1517) | KIRP, GBM |
| | | | NLIAELHNIL (A02.01) (SEQ ID NO: 1518) | |
| | | | RYTIFVLKDI (A24.02) (SEQ ID NO: 1519) | |
| | | | TITRYTIFVL (A02.01) (SEQ ID NO: 1520) | |
| | | | TPPNLIAEL (B07.02) (SEQ ID NO: 1521) | |
| PTEN | T202fs | NYSNVQWRNLQS | FLQFRTHTT (A02.01, B08.01) (SEQ ID NO: 1522) | UCEC, PRAD, |
| | G209fs | SVCGLPAKGEDIF | LPAKGEDIFL (B07.02) (SEQ ID NO: 1523) | SKCM, STAD, |
| | C211fs | LQFRTHTTGRQV | LQFRTHTTGR (A03.01) (SEQ ID NO: 1524) | BRCA, LUSC, |
| | I224fs | HVL* (SEQ ID NO: | NLQSSVCGL (A02.01) (SEQ ID NO: 1525) | KIRC, LIHC, |
| | G230fs | 68) | SSVCGLPAK (A03.01) (SEQ ID NO: 1526) | KIRP, GBM |
| | P231fs | | VQWRNLQSSV (A02.01) (SEQ ID NO: 1527) | |
| | R233fs | | | |
| | D236fs | | | |
| PTEN | G251fs | YQSRVLPQTEQD | GQNVSLLGK (A03.01) (SEQ ID NO: 1528) | UCEC, PRAD, |
| | E256fs | AKKGQNVSLLGK | HTRTRGNLRK (A03.01) (SEQ ID NO: 1529) | SKCM, STAD, |
| | K260fs | YILHTRTRGNLRK | ILHTRTRGNL (B08.01) (SEQ ID NO: 1530) | BRCA, LUSC, |
| | Q261fs | SRKWKSM* (SEQ | KGQNVSLLGK (A03.01) (SEQ ID NO: 1531) | KIRC, LIHC, |
| | L265fs | ID NO: 69) | LLGKYILHT (A02.01) (SEQ ID NO: 1532) | KIRP, GBM |
| | M270fs | | LRKSRKWKSM (B08.01) (SEQ ID NO: 1533) | |
| | H272fs | | SLLGKYILH (A03.01) (SEQ ID NO: 1534) | |
| | T286fs | | SLLGKYILHT (A02.01) (SEQ ID NO: 1535) | |
| | E288fs | | | |
| TP53 | A70fs | SSQNARGCSPRGP | CTSPLLAPV (A02.01) (SEQ ID NO: 1536) | BRCA, CRC, |
| | P72fs | CTSSSYTGGPCTS | FPENLPGQL (B07.02) (SEQ ID NO: 1537) | LUAD, PRAD, |
| | A76fs | PLLAPVIFCPFPEN | GLLAFWDSQV (A02.01) (SEQ ID NO: 1538) | HNSC, LUSC, |
| | A79fs | LPGQLRFPSGLLA | IFCPFPENL (A24.02) (SEQ ID NO: 1539) | PAAD, STAD, |
| | P89fs | FWDSQVCDLHVL | LLAFWDSQV (A02.01) (SEQ ID NO: 1540) | BLCA, OV, LIHC, |
| | W91fs | PCPQQDVLPTGQ | LLAPVIFCP (A02.01) (SEQ ID NO: 1541) | SKCM, UCEC, |
| | S96fs | DLPCAAVG* (SEQ | LLAPVIFCPF (A02.01, A24.02) (SEQ ID NO: 1542) | LAML, UCS, |
| | V97fs | ID NO: 70) | LPCPQQDVL (B07.02) (SEQ ID NO: 1543) | KICH, GBM, ACC |
| | V97fs | | RFPSGLLAF (A24.02) (SEQ ID NO: 1544) | |
| | G108fs | | RFPSGLLAFW (A24.02) (SEQ ID NO: 1545) | |
| | G117fs | | SPLLAPVIF (B07.02) (SEQ ID NO: 1546) | |
| | S121fs | | SPRGPCTSS (B07.02) (SEQ ID NO: 1547) | |
| | V122fs | | SPRGPCTSSS (B07.02) (SEQ ID NO: 1548) | |
| | C124fs | | SQVCDLHVL (A02.01) (SEQ ID NO: 1549) | |
| | K139fs | | VIFCPFPENL (A02.01) (SEQ ID NO: 1550) | |
| | V143fs | | | |
| TP53 | V173fs | GAAPTMSAAQIA | AMVWPLLSI (A02.01) (SEQ ID NO: 1551) | BRCA, CRC, |
| | H178fs | MVWPLLSILSEW | AMVWPLLSIL (A02.01) (SEQ ID NO: 1552) | LUAD, PRAD, |
| | D186fs | KEICVWSIWMTE | AQIAMVWPL (A02.01, A24.02) (SEQ ID NO: 1553) | HNSC, LUSC, |
| | H193fs | TLFDIVWWCPMS | AQIAMVWPLL (A02.01) (SEQ ID NO: 1554) | PAAD, STAD, |
| | L194fs | RLRLALTVPPSTT | CPMSRLRLA (B07.02, B08.01) (SEQ ID NO: 1555) | BLCA, OV, LIHC, |
| | E198fs | TTCVTVPAWAA* | CPMSRLRLAL (B07.02, B08.01) (SEQ ID NO: 1556) | SKCM, UCEC, |
| | V203fs | (SEQ ID NO: 71) | IAMVWPLLSI (A02.01, A24.02, B08.01) (SEQ ID NO: | LAML, UCS, |
| | E204fs | | 1557) | KICH, GBM, ACC |
| | L206fs | | ILSEWKEICV (A02.01) (SEQ ID NO: 1558) | |
| | D207fs | | IVWWCPMSR (A03.01) (SEQ ID NO: 1559) | |
| | N210fs | | IVWWCPMSRL (A02.01) (SEQ ID NO: 1560) | |
| | T211fs | | IWMTETLFDI (A24.02) (SEQ ID NO: 1561) | |
| | F212fs | | LLSILSEWK (A03.01) (SEQ ID NO: 1562) | |
| | V225fs | | MSAAQIAMV (A02.01) (SEQ ID NO: 1563) | |
| | S241fs | | MSRLRLALT (B08.01) (SEQ ID NO: 1564) | |
| | | | MSRLRLALTV (B08.01) (SEQ ID NO: 1565) | |
| | | | MVWPLLSIL (A02.01) (SEQ ID NO: 1566) | |
| | | | RLALTVPPST (A02.01) (SEQ ID NO: 1567) | |
| | | | TLFDIVWWC (A02.01) (SEQ ID NO: 1568) | |
| | | | TLFDIVWWCP (A02.01) (SEQ ID NO: 1569) | |
| | | | TMSAAQIAMV (A02.01) (SEQ ID NO: 1570) | |
| | | | VWSIWMTETL (A24.02) (SEQ ID NO: 1571) | |
| | | | WMTETLFDI (A02.01, A24.02) (SEQ ID NO: 1572) | |
| | | | WMTETLFDIV (A01.01, A02.01) (SEQ ID NO: 1573) | |
| TP53 | R248fs | TGGPSSPSSHWKT | ALRCVFVPV (A02.01, B08.01) (SEQ ID NO: 1574) | BRCA, CRC, |
| | P250fs | PVVIYWDGTALR | ALRCVFVPVL (A02.01, B08.01) (SEQ ID NO: 1575) | LUAD, PRAD, |
| | S260fs | CVFVPVLGETGA | ALSEHCPTT (A02.01) (SEQ ID NO: 1576) | HNSC, LUSC, |
| | N263fs | QRKRISARKGSLT | AQRKRISARK (A03.01) (SEQ ID NO: 1577) | PAAD, STAD, |
| | G266fs | TSCPQGALSEHCP | GAQRKRISA (B08.01) (SEQ ID NO: 1578) | BLCA, OV, LIHC, |
| | N268fs | TTPAPLPSQRRNH | HWMENISPF (A24.02) (SEQ ID NO: 1579) | SKCM, UCEC, |
| | V272fs | WMENISPFRSVG | LPSQRRNHW (B07.02) (SEQ ID NO: 1580) | LAML, UCS, |
| | V274fs | VSASRCSES* | LPSQRRNHWM (B07.02, B08.01) (SEQ ID NO: 1581) | KICH, GBM, ACC |
| | P278fs | (SEQ ID NO: 72) | NISPFRSVGV (A02.01) (SEQ ID NO: 1582) | |
| | D281fs | | RISARKGSL (B07.02, B08.01) (SEQ ID NO: 1583) | |
| | R282fs | | SPFRSVGVSA (B07.02) (SEQ ID NO: 1584) | |
| | T284fs | | SPSSHWKTPV (B07.02, B08.01) (SEQ ID NO: 1585) | |
| | E285fs | | TALRCVFVPV (A02.01) (SEQ ID NO: 1586) | |
| | L289fs | | VIYWDGTAL (A02.01) (SEQ ID NO: 1587) | |
| | K292fs | | VIYWDGTALR (A03.01) (SEQ ID NO: 1588) | |
| | P301fs | | VLGETGAQRK (A03.01) (SEQ ID NO: 1589) | |
| | S303fs | | | |
| | T312fs | | | |
| | S314fs | | | |
| | K319fs | | | |
| | K320fs | | | |
| | P322fs | | | |
| | Y327fs | | | |
| | F328fs | | | |
| | L330fs | | | |
| | R333fs | | | |
| | R335fs | | | |
| | R337fs | | | |
| | E339fs | | | |
| TP53 | S149fs | FHTPARHPRPRHG | HPRPRHGHL (B07.02, B08.01) (SEQ ID NO: 1590) | BRCA, CRC, |
| | P151fs | HLQAVTAHDGGC | HPRPRHGHLQ (B07.02) (SEQ ID NO: 1591) | LUAD, PRAD, |
| | P152fs | EALPPP* (SEQ ID | RPRHGHLQA (B07.02) (SEQ ID NO: 1592) | HNSC, LUSC, |
| | V157fs | NO: 73) | RPRHGHLQAV (B07.02, B08.01) (SEQ ID NO: 1593) | PAAD, STAD, |
| | Q165fs | | | BLCA, OV, LIHC, |
| | S166fs | | | SKCM, UCEC, |
| | H168fs | | | LAML, UCS, |
| | V173fs | | | KICH, GBM, ACC |
| TP53 | P47fs | CCPRTILNNGSLK | GSLKTQVQMK (A03.01) (SEQ ID NO: 1594) | BRCA, CRC, |
| | D48fs | TQVQMKLPECQR | PPGPCHLLSL (B07.02) (SEQ ID NO: 1595) | LUAD, PRAD, |
| | D49fs | LLPPWPLHQQLL | RTILNNGSLK (A03.01) (SEQ ID NO: 1596) | HNSC, LUSC, |
| | Q52fs | HRRPLHQPPPGPC | SLKTQVQMK (A03.01) (SEQ ID NO: 1597) | PAAD, STAD, |
| | F54fs | HLLSLPRKPTRAA | SLKTQVQMKL (B08.01) (SEQ ID NO: 1598) | BLCA, OV, LIHC, |
| | E56fs | TVSVWASCILGQP | TILNNGSLK (A03.01) (SEQ ID NO: 1599) | SKCM, UCEC, |
| | P58fs | SL* (SEQ ID NO: | | LAML, UCS, |
| | P60fs | 74) | | KICH, GBM, ACC |
| | E62fs | | | |
| | M66fs | | | |
| | P72fs | | | |
| | V73fs | | | |
| | P75fs | | | |
| | A78fs | | | |
| | P82fs | | | |
| | P85fs | | | |
| | S96fs | | | |
| | P98fs | | | |
| | T102fs | | | |
| | Y103fs | | | |
| | G108fs | | | |
| | F109fs | | | |
| | R110fs | | | |
| | G117fs | | | |
| TP53 | L26fs | VRKHFQTYGNYF | CPPCRPKQWM (B07.02) (SEQ ID NO: 1600) | BRCA, CRC, |
| | P27fs | LKTTFCPPCRPKQ | TTFCPPCRPK (A03.01) (SEQ ID NO: 1601) | LUAD, PRAD, |
| | P34fs | WMI* (SEQ ID NO: | | HNSC, LUSC, |
| | P36fs | 75) | | PAAD, STAD, |
| | A39fs | | | BLCA, OV, LIHC, |
| | Q38fs | | | SKCM, UCEC, |
| | | | | LAML, UCS, |
| | | | | KICH, GBM, ACC |
| TP53 | C124fs | LARTPLPSTRCFA | CFANWPRPAL (A24.02) (SEQ ID NO: 1602) | BRCA, CRC, |
| | L130fs | NWPRPALCSCGLI | FANWPRPAL (B07.02, B08.01) (SEQ ID NO: 1603) | LUAD, PRAD, |
| | N131fs | PHPRPAPASAPWP | GLIPHPRPA (A02.01) (SEQ ID NO: 1604) | HNSC, LUSC, |
| | C135fs | STSSHST (SEQ ID | HPRPAPASA (B07.02, B08.01) (SEQ ID NO: 1605) | PAAD, STAD, |
| | K139fs | NO: 76)* | HPRPAPASAP (B07.02) (SEQ ID NO: 1606) | BLCA, OV, LIHC, |
| | A138fs | | IPHPRPAPA (B07.02, B08.01) (SEQ ID NO: 1607) | SKCM, UCEC, |
| | T140fs | | IPHPRPAPAS (B07.02) (SEQ ID NO: 1608) | LAML, UCS, |
| | V143fs | | RPALCSCGL (B07.02) (SEQ ID NO: 1609) | KICH, GBM, ACC |
| | Q144fs | | RPALCSCGLI (B07.02) (SEQ ID NO: 1610) | |
| | V147fs | | TPLPSTRCF (B07.02) (SEQ ID NO: 1611) | |
| | T150fs | | WPRPALCSC (B07.02) (SEQ ID NO: 1612) | |
| | P151fs | | WPRPALCSCG (B07.02) (SEQ ID NO: 1613) | |
| | P152fs | | | |
| | G154fs | | | |
| | R156fs | | | |
| | R158fs | | | |
| | A161fs | | | |
| VHL | L178fs | ELQETGHRQVAL | ALRRSGRPPK (A03.01) (SEQ ID NO: 1614) | KIRC, KIRP |
| | D179fs | RRSGRPPKCAERP | GLVPSLVSK (A03.01) (SEQ ID NO: 1615) | |
| | L184fs | GAADTGAHCTST | KISVETYTV (A02.01) (SEQ ID NO: 1616) | |
| | T202fs | DGRLKISVETYTV | LLMVLMSLDL (A02.01, B08.01) (SEQ ID NO: 1617) | |
| | R205fs | SSQLLMVLMSLD | LMSLDLDTGL (A02.01) (SEQ ID NO: 1618) | |
| | D213fs | LDTGLVPSLVSKC | LMVLMSLDL (A02.01) (SEQ ID NO: 1619) | |
| | G212fs | LILRVK (SEQ ID | LVSKCLILRV (A02.01) (SEQ ID NO: 1620) | |
| | | NO: 77)* | QLLMVLMSL (A02.01, B08.01) (SEQ ID NO: 1621) | |
| | | | RPGAADTGA (B07.02) (SEQ ID NO: 1622) | |
| | | | RPGAADTGAH (B07.02) (SEQ ID NO: 1623) | |
| | | | SLDLDTGLV (A02.01) (SEQ ID NO: 1624) | |
| | | | SLVSKCLIL (A02.01, B08.01) (SEQ ID NO: 1625) | |
| | | | SQLLMVLMSL (A02.01) (SEQ ID NO: 1626) | |
| | | | TVSSQLLMV (A02.01) (SEQ ID NO: 1627) | |
| | | | TYTVSSQLL (A24.02) (SEQ ID NO: 1628) | |
| | | | TYTVSSQLLM (A24.02) (SEQ ID NO: 1629) | |
| | | | VLMSLDLDT (A02.01) (SEQ ID NO: 1630) | |
| | | | VPSLVSKCL (B07.02) (SEQ ID NO: 1631) | |
| | | | VSKCLILRVK (A03.01) (SEQ ID NO: 1632) | |
| | | | YTVSSQLLM (A01.01) (SEQ ID NO: 1633) | |
| | | | YTVSSQLLMV (A02.01) (SEQ ID NO: 1634) | |
| VHL | L158fs | KSDASRLSGA* | | KIRC, KIRP |
| | K159fs | (SEQ ID NO: 78) | | |
| | R161fs | | | |
| | Q164fs | | | |
| VHL | P146fs | RTAYFCQYHTAS | FCQYHTASV (B08.01) (SEQ ID NO: 1635) | KIRC, KIRP |
| | I147fs | VYSERAMPPGCP | | |
| | F148fs | EPSQA* (SEQ ID | | |
| | L158fs | NO: 79) | | |
| VHL | S68fs | TRASPPRSSSAIA | CPYGSTSTA (B07.02) (SEQ ID NO: 1636) | KIRC, KIRP |
| | S72fs | VRASCCPYGSTST | CPYGSTSTAS (B07.02) (SEQ ID NO: 1637) | |
| | I75fs | ASRSPTQRCRLAR | LARAAASTAT (B07.02) (SEQ ID NO: 1638) | |
| | S80fs | AAASTATEVTFGS | MLTDSLFLP (A02.01) (SEQ ID NO: 1639) | |
| | P86fs | SEMQGHTMGFW | PPRSSSAIAV (B07.02) (SEQ ID NO: 1640) | |
| | P97fs | LTKLNYLCHLSM | RAAASTATEV (B07.02) (SEQ ID NO: 1641) | |
| | I109fs | LTDSLFLPISHCQ | SPPRSSSAI (B07.02) (SEQ ID NO: 1642) | |
| | H115fs | CIL* (SEQ ID NO: | SPPRSSSAIA (B07.02) (SEQ ID NO: 1643) | |
| | L116fs | 80) | SPTQRCRLA (B07.02) (SEQ ID NO: 1644) | |
| | G123fs | | TQRCRLARA (B08.01) (SEQ ID NO: 1645) | |
| | T124fs | | TQRCRLARAA (B08.01) (SEQ ID NO: 1646) | |
| | N131fs | | | |
| | L135fs | | | |
| | V137fs | | | |
| | G144fs | | | |
| | D143fs | | | |
| | I147fs | | | |
| VHL | K171fs | SSLRITGDWTSSG | KIWKTTQMCR (A03.01) (SEQ ID NO: 1647) | KIRC, KIRP |
| | P172fs | RSTKIWKTTQMC | WTSSGRSTK (A03.01) (SEQ ID NO: 1648) | |
| | N174fs | RKTWSG* (SEQ | | |
| | L178fs | ID NO: 81) | | |
| | D179fs | | | |
| | L188fs | | | |
| VHL | V62fs | RRRRGGVGRRGV | ALGELARAL (A02.01) (SEQ ID NO: 1649) | KIRC, KIRP |
| | V66fs | RPGRVRPGGTGR | AQLRRRAAA (B08.01) (SEQ ID NO: 1650) | |
| | Q73fs | RGGDGGRAAAA | AQLRRRAAAL (B08.01) (SEQ ID NO: 1651) | |
| | V84fs | RAALGELARALP | ARRAARMAQL (B08.01) (SEQ ID NO: 1652) | |
| | F91fs | GHLLQSQSARRA | HPQLPRSPL (B07.02, B08.01) (SEQ ID NO: 1653) | |
| | T100fs | ARMAQLRRRAA | HPQLPRSPLA (B07.02) (SEQ ID NO: 1654) | |
| | P103fs | ALPNAAAWHGPP | LARALPGHL (B07.02) (SEQ ID NO: 1655) | |
| | S111fs | HPQLPRSPLALQR | LARALPGHLL (B07.02) (SEQ ID NO: 1656) | |
| | L116fs | CRDTRWASG* | MAQLRRRAA (B07.02, B08.01) (SEQ ID NO: 1657) | |
| | H115fs | (SEQ ID NO: 82) | MAQLRRRAAA (B07.02, B08.01) (SEQ ID NO: 1658) | |
| | D126fs | | QLRRRAAAL (B07.02, B08.01) (SEQ ID NO: 1659) | |
| | | | RAAALPNAAA (B07.02) (SEQ ID NO: 1660) | |
| | | | RMAQLRRRAA (B07.02, B08.01) (SEQ ID NO: 1661) | |
| | | | SQSARRAARM (B08.01) (SEQ ID NO: 1662) | |
| TABLE 1D | | CRYPTIC EXON¹ | | |
| AR-v7 | cryptic final | SCKVFFKRAAEG | GMTLGEKFRV (A02:01) (SEQ ID NO: 1663) | Prostate Cancer, |
| | exon | KQKYLCASRNDC | RVGNCKHLK (A03.01) (SEQ ID NO: 1664) | Castration-resistant |
| | | TIDKFRRKNCPSC | | Prostate Cancer |
| | | RLRKCYEAGMTL | | |
| | | GEKFRVGNCKHL | | |
| | | KMTRP* (SEQ ID | | |
| | | NO. 134) | | |
| TABLE 1E | | OUT OF FRAME | | |
| | | FUSIONS^{1,3} | | |
| AC011997.1: | AC011997.1 | MAGAPPPASLPPC | GPSEPGNNI (B07.02) (SEQ ID NO: 1665) | LUSC, Breast |
| LRRC69 | LRRC69 | SLISDCCASNQRD | KICNESASRK (A03.01) (SEQ ID NO: 1666) | Cancer, Head and |
| | *out-of-frame | SVGVGPSEP:G:NN | | Neck Cancer, |
| | | IKICNESASRK* | | LUAD |
| | | (SEQ ID NO: 135) | | |
| EEF1DP3 | EEF1DP3:FR | HGWRPFLPVRAR | GIQVLNVSLK (A03.01) (SEQ ID NO: 1667) | Breast Cancer |
| | Y *out-of- | SRWNRRLDVTVA | IQVLNVSLK (A03.01) (SEQ ID NO: 1668) | |
| | frame | NGR:S:WKYGWS | KSSSNVISY (A01.01, A03.01) (SEQ ID NO: 1669) | |
| | | LLRVPQVNGIQV | KYGWSLLRV (A24.02) (SEQ ID NO: 1670) | |
| | | LNVSLKSSSNVIS | RSWKYGWSL (A02.01) (SEQ ID NO: 1671) | |
| | | YE* (SEQ ID NO: | SLKSSSNVI (B08.01) (SEQ ID NO: 1672) | |
| | | 891) | SWKYGWSLL (A24.02) (SEQ ID NO: 1673) | |
| | | | TVANGRSWK (A03.01) (SEQ ID NO: 1674) | |
| | | | VPQVNGIQV (B07.02) (SEQ ID NO: 1675) | |
| | | | VPQVNGIQVL (B07.02) (SEQ ID NO: 1676) | |
| | | | VTVANGRSWK (A03.01) (SEQ ID NO: 1677) | |
| | | | WSLLRVPQV (B08.01) (SEQ ID NO: 1678) | |
| MAD1L1:MAFK | MAD1L1:MAFK | RLKEVFQTKIQEF | HPGDCLIFKL (B07.02) (SEQ ID NO: 1679) | CLL |
| | | RKACYTLTGYQI | KLRVPGSSV (B07.02) (SEQ ID NO: 1680) | |
| | | DITTENQYRLTSL | KLRVPGSSVL (B07.02) (SEQ ID NO: 1681) | |
| | | YAEHPGDCLIFK:: | RVPGSSVLV (A02.01) (SEQ ID NO: 1682) | |
| | | LRVPGSSVLVTV | SVLVTVPGL (A02.01) (SEQ ID NO: 1683) | |
| | | PGL* (SEQ ID NO: | VPGSSVLVTV (B07.02) (SEQ ID NO: 1684) | |
| | | 137) | | |
| PPP1R1B:STARD3 | PPP1R1B:STARD3 | AEVLKVIRQSAG | ALLLRPRPPR (A03.01) (SEQ ID NO: 1685) | Breast Cancer |
| | | QKTTCGQGLEGP | ALSALLLRPR (A03.01) (SEQ ID NO: 1686) | |
| | | WERPPPLDESERD | | |
| | | GGSEDQVEDPAL | | |
| | | S:A:LLLRPRPPRP | | |
| | | EVGAHQDEQAA | | |
| | | QGADPRLGAQP | | |
| | | ACRGLPGLLTVP | | |
| | | QPEPLLAPPSAA* | | |
| | | (SEQ ID NO: 138) | | |
| Table 1F | | IN FRAME | | |
| | | DELETIONS and | | |
| | | FUSIONS^{1,2} | | |
| BCR:ABL | BCR:ABL | ERAEWRENIREQ | LTINKEEAL (A02.01, B08.01) (SEQ ID NO: 1687) | CML, AML |
| | | QKKCFRSFSLTSV | | |
| | | ELQMLTNSCVKL | | |
| | | QTVHSIPLTINKE:: | | |
| | | EALQRPVASDFE | | |
| | | PQGLSEAARWN | | |
| | | SKENLLAGPSEN | | |
| | | DPNLFVALYDFV | | |
| | | ASG (SEQ ID NO: | | |
| | | 119) | | |
| BCR:ABL | BCR:ABL | ELQMLTNSCVKL | IVHSATGFK (A03.01) (SEQ ID NO: 1688) | CML, AML |
| | | QTVHSIPLTINKE | ATGFKQSSK (A03.01) (SEQ ID NO: 1689) | |
| | | DDESPGLYGFLN | | |
| | | VIVHSATGFKQSS | | |
| | | :K:ALQRPVASDF | | |
| | | EPQGLSEAARW | | |
| | | NSKENLLAGPSE | | |
| | | NDPNLFVALYDF | | |
| | | VASGD (SEQ ID | | |
| | | NO: 120) | | |
| C11orf95:RELA | C11orf95:RELA | ISNSWDAHLGLG | ELFPLIFPA (A02.01, B08.01) (SEQ ID NO: 1690) | Supretentorial |
| | | ACGEAEGLGVQG | KGPELFPLI (A02.01, A24.02) (SEQ ID NO: 1691) | ependyomas |
| | | AEEEEEEEEEEEE | KGPELFPLIF (A24.02) (SEQ ID NO: 1692) | |
| | | EGAGVPACPPKG | | |
| | | P:E:LFPLIFPAEP | | |
| | | AQASGPYVEIIE | | |
| | | QPKQRGMRFRY | | |
| | | KCEGRSAGSIPG | | |
| | | ERSTD (SEQ ID | | |
| | | NO: 121) | | |
| CBFB:MYH11 | (variant “type | LQRLDGMGCLEF | | AML |
| | a”) | DEERAQQEDALA | | |
| | | QQAFEEARRRTR | | |
| | | EFEDRDRSHREE | | |
| | | ME::VHELEKSKR | | |
| | | ALETQMEEMKT | | |
| | | QLEELEDELQAT | | |
| | | EDAKLRLEVNM | | |
| | | QALKGQF (SEQ | | |
| | | ID NO: 122) | | |
| CD74:ROS1 | (exon6:exon32) | KGSFPENLRHLK | KPTDAPPKAGV (B07.02) (SEQ ID NO: 1693) | NSCLC, Crizotinib |
| | | NTMETIDWKVFE | | resistance |
| | | SWMHHWLLFEM | | |
| | | SRHSLEQKPTDAP | | |
| | | PK::AGVPNKPGI | | |
| | | PKLLEGSKNSIQ | | |
| | | WEKAEDNGCRI | | |
| | | TYYILEIRKSTSN | | |
| | | NLQNQ (SEQ ID | | |
| | | NO: 123) | | |
| EGFR | EGFRvIII | MRPSGTAGAALL | ALEEKKGNYV (A02.01) (SEQ ID NO: 1694) | GBM |
| | (internal | ALLAALCPASRA | | |
| | deletion) | LEEKK:G:NYVVT | | |
| | | DHGSCVRACGAD | | |
| | | SYEMEEDGVRKC | | |
| | | KKCEGPCRKVCN | | |
| | | GIGIGEFKD (SEQ | | |
| | | ID NO: 125) | | |
| EGFR:SEPT14 | EGFR:SEPT14 | LPQPPICTIDVYMI | IQLQDKFEHL (A02.01, B08.01) (SEQ ID NO: 1695) | GBM, Glioma, |
| | | MVKCWMIDADS | QLQDKFEHL (A02.01, B08.01) (SEQ ID NO: 1696) | Head and Neck |
| | | RPKFRELIIEFSKM | QLQDKFEELK (A03.01) (SEQ ID NO: 1697) | Cancer |
| | | ARDPQRYLVIQ::L | YLVIQLQDKF (A02.01, A24.02) (SEQ ID NO: 1698) | |
| | | QDKFEHLKMIQ | | |
| | | QEEIRKLEEEKK | | |
| | | QLEGEIIDFYKM | | |
| | | KAASEALQTQLS | | |
| | | TD (SEQ ID NO: | | |
| | | 124) | | |
| EML4:ALK | EML4.ALK | SWENSDDSRNKL | QVYRRKHQEL (B08.01) (SEQ ID NO: 1699) | NSCLC |
| | | SKIPSTPKLIPKVT | STREKNSQV (B08.01) (SEQ ID NO: 1700) | |
| | | KTADKHKDVIIN | VYRRKHQEL (A24.02, B08.01) (SEQ ID NO: 1701) | |
| | | QAKMSTREKNSQ | | |
| | | :V:YRRKHQELQ | | |
| | | AMQMELQSPEY | | |
| | | KLSKLRTSTIMT | | |
| | | DYNPNYCFAGK | | |
| | | TSSISDL (SEQ ID | | |
| | | NO: 126) | | |
| FGFR3:TACC3 | FGFR3:TACC3 | EGHRMDKPANCT | VLTVTSTDV (A02.01) (SEQ ID NO: 1702) | Bladder Cancer, |
| | | HDLYMIMRECW | VLTVTSTDVK (A03.01) (SEQ ID NO: 1703) | LUSC |
| | | HAAPSQRPTFKQL | | |
| | | VEDLDRVLTVTS | | |
| | | TD::VKATQEENR | | |
| | | ELRSRCEELHGK | | |
| | | NLELGKIMDRFE | | |
| | | EVVYQAMEEVQ | | |
| | | KQKELS (SEQ ID | | |
| | | NO: 127) | | |
| NAB:STAT6 | NAB:STAT6 | RDNTLLLRRVELF | IMSLWGLVS (A02.01) (SEQ ID NO: 1704) | Solitary fibrous |
| | (“variant 1” | SLSRQVARESTYL | IMSLWGLVSK (A03.01) (SEQ ID NO: 1705) | tumors |
| | of | SSLKGSRLHPEEL | KLKQEATSK (A03.01) (SEQ ID NO: 1706) | |
| | Chmielecki | GGPPLKKLKQE:: | QIMSLWGLV (A02.01) (SEQ ID NO: 1707) | |
| | e [symbol] al.) | ATSKSQIMSLWG | SQIMSLWGL (A02.01, A24.02, B08.01) (SEQ ID NO: | |
| | | LVSKMPPEKVQ | 1708) | |
| | | RLYVDFPQHLR | SQIMSLWGLV (A02.01) (SEQ ID NO: 1709) | |
| | | HLLGDWLESQP | TSKSQIMSL (B08.01) (SEQ ID NO: 1710) | |
| | | WEFLVGSDAFC | | |
| | | C (SEQ ID NO: | | |
| | | 128) | | |
| NDRG1:ERG | NDRG1:ERG | MSREMQDVDLAE | LLQEFDVQEA (A02.01) (SEQ ID NO: 1711) | Prostate Cancer |
| | | VKPLVEKGETITG | LQEFDVQEAL (A02.01) (SEQ ID NO: 1712) | |
| | | LLQEFDVQ::EALS | | |
| | | VVSEDQSLFECA | | |
| | | YGTPHLAKTEM | | |
| | | TASSSSDYGQTS | | |
| | | KMSPRVPQQDW | | |
| | | (SEQ ID NO: 129) | | |
| PML:RARA | PML:RARA | VLDMHGFLRQAL | | Acute |
| | (exon3:exon3) | CRLRQEEPQSLQA | | promyelocytic |
| | | AVRTDGFDEFKV | | leukemia |
| | | RLQDLSSCITQGK | | |
| | | :A:IETQSSSSEEIV | | |
| | | PSPPSPPPLPRIY | | |
| | | KPCFVCQDKSSG | | |
| | | YHYGVSACEGC | | |
| | | KG (SEQ ID NO: | | |
| | | 131) | | |
| PML:RARA | PML:RARA | RSSPEQPRPSTSK | | Acute |
| | (exon6:exon3) | AVSPPHLDGPPSP | | promyelocytic |
| | | RSPVIGSEVFLPNS | | leukemia |
| | | NHVASGAGEA:A: | | |
| | | IETQSSSSEEIVPS | | |
| | | PPSPPPLPRIYKP | | |
| | | CFVCQDKSSGYH | | |
| | | YGVSACEGCKG | | |
| | | (SEQ ID NO: 132) | | |
| RUNX1 | RUNX1(ex5)- | VARFNDLRFVGR | GPREPRNRT (B07.02) (SEQ ID NO: 1713) | AML |
| | RUNX1T1(ex2) | SGRGKSFTLTITV | RNRTEKHSTM (B08.01) (SEQ ID NO: 1714) | |
| | | FTNPPQVATYHR | | |
| | | AIKITVDGPREPR: | | |
| | | N:RTEKHSTMPD | | |
| | | SPVDVKTQSRLT | | |
| | | PPTMPPPPTTQG | | |
| | | APRTSSFTPTTLT | | |
| | | NGT (SEQ ID NO: | | |
| | | 133) | | |
| TMPRSS2:ERG | TMPRSS2:ERG | MALNS::EALSVV | ALNSEALSV (A02.01) (SEQ ID NO: 140) | Prostate Cancer |
| | | SEDQSLFECAYGT | ALNSEALSVV (A02.01) (SEQ ID NO: 1715) | |
| | | PHLAKTEMTASSS | MALNSEALSV (A02.01, B08.01) (SEQ ID NO: 1716) | |
| | | SDYGQTSKMSPR | | |
| | | VPQQDW (SEQ ID | | |
| | | NO: 130) | | |

¹Underlined AAs represent non-native AAs
²Bolded AAs represent native AAs of the amino acid sequence encoded by the second of the two fused genes
³Bolded and underlined AAs represent non-native AAs of the amino acid sequence encoded by the second of the two fused genes due to a framshift. [symbol]
indicates data missing or illegible when filed

TABLE 2

| | Exemplary | | | |
|---|---|---|---|---|
| | Protein | Mutation Sequence | | Exemplary |
| Gene | Change | Context | Peptides (HLA allele example(s)) | Diseases |
| Table 2A | | POINT MUTATIONS¹ | | |
| AKT1 | E17K | MSDVAIVKEGWLHK | KYIKTWRPRY (A24.02) (SEQ ID NO: 1741) | BRCA, CESC, |
| | | RGKYIKTWRPRYFLL | WLHKRGKYI (A02.01, B07.02, B08.01) | HNSC, LUSC, |
| | | KNDGTFIGYKERPQD | (SEQ ID NO: 1742) | PRAD, SKCM, |
| | | VDQREAPLNNFSVAQ | WLHKRGKYIK (A03.01) (SEQ ID NO: 1743) | THCA |
| | | CQLMKTER (SEQ ID | | |
| | | NO: 1717) | | |
| ANAPC1 | T537A | TMLVLEGSGNLVLYT | APKPLSKLL (B07.02) (SEQ ID NO: 1744) | GBM, LUSC, PAAD, |
| | | GVVRVGKVFIPGLPA | GVSAPKPLSK (A03.01) (SEQ ID NO: 1745) | PRAD, SKCM |
| | | PSLTMSNTMPRPSTPL | VSAPKPLSK (A03.01) (SEQ ID NO: 1746) | |
| | | DGVSAPKPLSKLLGS | | |
| | | LDEVVLLSPVPELRDS | | |
| | | SKLHDSLYNEDCTFQ | | |
| | | QLGTYIHSI (SEQ ID | | |
| | | NO: 1718) | | |
| FGFR3 | S249C | HRIGGIKLRHQQWSL | CPHRPILQA (B07.02) (SEQ ID NO: 159) | BLCA, HNSC, |
| | | VMESVVPSDRGNYTC | | KIRP, LUSC |
| | | VVENKFGSIRQTYTL | | |
| | | DVLERCPHRPILQAGL | | |
| | | PANQTAVLGSDVEFH | | |
| | | CKVYSDAQPHIQWLK | | |
| | | HVEVNGSKVG (SEQ | | |
| | | ID NO: 19) | | |
| FRG1B | I10T | MREPIYMHSTMVFLP | KLSDSRTAL (A02.01, B07.02, B08.01) (SEQ | KIRP, PRAD, SKCM |
| | | WELHTKKGPSPPEQF | ID NO: 1747) | |
| | | MAVKLSDSRTALKSG | KLSDSRTALK (A03.01) (SEQ ID NO: 1748) | |
| | | YGKYLGINSDELVGH | LSDSRTALK (A01.01, A03.01) (SEQ ID NO: | |
| | | SDAIGPREQWEPVFQ | 1749) | |
| | | NGKMALLASNSCFIR | RTALKSGYGK (A03.01) (SEQ ID NO: 1750) | |
| | | (SEQ ID NO: 1719) | TALKSGYGK (A03.01) (SEQ ID NO: 1751) | |
| FRG1B | L52S | AVKLSDSRIALKSGY | ALSASNSCF (A02.01, A24.02, B07.02) (SEQ | GBM, KIRP, PRAD, |
| | | GKYLGINSDELVGHS | ID NO: 163) | SKCM |
| | | DAIGPREQWEPVFQN | ALSASNSCFI (A02.01) (SEQ ID NO: 1752) | |
| | | GKMALSASNSCFIRC | FQNGKMALSA (A02.01, B08.01) (SEQ ID | |
| | | NEAGDIEAKSKTAGE | NO: 164) | |
| | | EEMIKIRSCAEKETKK | | |
| | | KDDIPEEDKG (SEQ ID | | |
| | | NO: 20) | | |
| HER2 | L755S | AMPNQAQMRILKETE | KVSRENTSPK (A03.01) (SEQ ID NO: 1753) | BRCA |
| | (Resistance) | LRKVKVLGSGAFGTV | | |
| | | YKGIWIPDGENVKIPV | | |
| | | AIKVSRENTSPKANK | | |
| | | EILDEAYVMAGVGSP | | |
| | | YVSRLLGICLTSTVQL | | |
| | | VTQLMPYGC (SEQ ID | | |
| | | NO: 1720) | | |
| IDH1 | R132G | RVEEFKLKQMWKSP | KPIIIGGHAY (B07.02) (SEQ ID NO: 175) | BLCA, BRCA, CRC, |
| | | NGTIRNILGGTVFREA | | GBM, HNSC, |
| | | IICKNIPRLVSGWVKPI | | LUAD, PAAD, |
| | | IIGGHAYGDQYRATD | | PRAD, UCEC |
| | | FVVPGPGKVEITYTPS | | |
| | | DGTQKVTYLVHNNEE | | |
| | | GGGVAMGM (SEQ ID | | |
| | | NO: 24) | | |
| KRAS | G12C | MTEYKLVVVGACGV | KLVVVGACGV (A02.01) (SEQ ID NO: 143) | BRCA, CESC, CRC, |
| | | GKSALTIQLIQNHFVD | LVVVGACGV (A02.01) (SEQ ID NO: 1754) | HNSC, LUAD, |
| | | EYDPTIEDSYRKQVVI | VVGACGVGK (A03.01, A11.01) (SEQ ID | PAAD, UCEC |
| | | DGETCLLDILDTAGQ | NO: 1755) | |
| | | E (SEQ ID NO: 1721) | VVVGACGVGK (A03.01) (SEQ ID NO: | |
| | | | 1756) | |
| KRAS | G12D | MTEYKLVVVGADGV | VVGADGVGK (A11.01) (SEQ ID NO: 1757) | BLCA, BRCA, |
| | | GKSALTIQLIQNHFVD | VVVGADGVGK (A11.01) (SEQ ID NO: | CESC, CRC, GBM, |
| | | EYDPTIEDSYRKQVVI | 1758) | HNSC, KIRP, LIHC, |
| | | DGETCLLDILDTAGQ | KLVVVGADGV (A02.01) (SEQ ID NO: | LUAD, PAAD, |
| | | E (SEQ ID NO: 1722) | 1759) | SKCM, UCEC |
| | | | LVVVGADGV (A02.01) (SEQ ID NO: 1760) | |
| KRAS | G12V | MTEYKLVVVGAVGV | KLVVVGAVGV (A02.01) (SEQ ID NO: | BRCA, CESC, CRC, |
| | | GKSALTIQLIQNHFVD | 1761) | LUAD, PAAD, |
| | | EYDPTIEDSYRKQVVI | LVVVGAVGV (A02.01) (SEQ ID NO: 1762) | THCA, UCEC |
| | | DGETCLLDILDTAGQ | VVGAVGVGK (A03.01, A11.01) (SEQ ID | |
| | | E (SEQ ID NO: 1723) | NO: 1763) | |
| | | | VVVGAVGVGK (A03.01, A11.01) (SEQ ID | |
| | | | NO: 1764) | |
| KRAS | Q61H | AGGVGKSALTIQLIQ | ILDTAGHEEY (A01.01) (SEQ ID NO: 1765) | CRC, LUSC, PAAD, |
| | | NHFVDEYDPTIEDSY | | SKCM, UCEC |
| | | RKQVVIDGETCLLDIL | | |
| | | DTAGHEEYSAMRDQ | | |
| | | YMRTGEGFLCVFAIN | | |
| | | NTKSFEDIHHYREQIK | | |
| | | RVKDSEDVPM (SEQ | | |
| | | ID NO: 1724) | | |
| KRAS | Q61L | AGGVGKSALTIQLIQ | ILDTAGLEEY (A01.01) (SEQ ID NO: 1766) | CRC, GBM, HNSC, |
| | | NHFVDEYDPTIEDSY | LLDILDTAGL (A02.01) (SEQ ID NO: 1767) | LUAD, SKCM, |
| | | RKQVVIDGETCLLDIL | | UCEC |
| | | DTAGLEEYSAMRDQ | | |
| | | YMRTGEGFLCVFAIN | | |
| | | NTKSFEDIHHYREQIK | | |
| | | RVKDSEDVPM (SEQ | | |
| | | ID NO: 1725) | | |
| NRAS | Q61K | AGGVGKSALTIQLIQ | ILDTAGKEEY (A01.01) (SEQ ID NO: 1768) | BLCA, CRC, LIHC, |
| | | NHFVDEYDPTIEDSY | | LUAD, LUSC, |
| | | RKQVVIDGETCLLDIL | | SKCM, THCA, |
| | | DTAGKEEYSAMRDQ | | UCEC |
| | | YMRTGEGFLCVFAIN | | |
| | | NSKSFADINLYREQIK | | |
| | | RVKDSDDVPM (SEQ | | |
| | | ID NO: 1726) | | |
| NRAS | Q61R | AGGVGKSALTIQLIQ | ILDTAGREEY (A01.01) (SEQ ID NO: 1769) | BLCA, CRC, LUSC, |
| | | NHFVDEYDPTIEDSY | | PAAD, PRAD, |
| | | RKQVVIDGETCLLDIL | | SKCM, THCA, |
| | | DTAGREEYSAMRDQ | | UCEC |
| | | YMRTGEGFLCVFAIN | | |
| | | NSKSFADINLYREQIK | | |
| | | RVKDSDDVPM (SEQ | | |
| | | ID NO: 1727) | | |
| PIK3CA | E542K | IEEHANWSVSREAGF | AISTRDPLSK (A03.01) (SEQ ID NO: 180) | BLCA, BRCA, |
| | | SYSHAGLSNRLARDN | | CESC, CRC, GBM, |
| | | ELRENDKEQLKAISTR | | HNSC, KIRC, KIRP, |
| | | DPLSKITEQEKDFLWS | | LIHC, LUAD, |
| | | HRHYCVTIPEILPKLL | | LUSC, PRAD, |
| | | LSVKWNSRDEVAQM | | UCEC |
| | | YCLVKDWPP (SEQ ID | | |
| | | NO: 33) | | |
| PTEN | R130Q | KFNCRVAQYPEEDHN | QTGVMICAY (A01.01) (SEQ ID NO: 197) | BRCA, CESC, CRC, |
| | | PPQLELIKPFCEDLDQ | | GBM, KIRC, LUSC, |
| | | WLSEDDNHVAAIHCK | | UCEC |
| | | AGKGQTGVMICAYLL | | |
| | | HRGKFLKAQEALDFY | | |
| | | GEVRTRDKKGVTIPS | | |
| | | QRRYVYYYSY (SEQ | | |
| | | ID NO: 37) | | |
| RAC1 | P29S | MQAIKCVVVGDGAV | FSGEYIPTV (A02.01) (SEQ ID NO: 202) | Melanoma |
| | | GKTCLLISYTTNAFSG | TTNAFSGEY (A01.01) (SEQ ID NO: 201) | |
| | | EYIPTVFDNYSANVM | YTTNAFSGEY (A01.01) (SEQ ID NO: 204) | |
| | | VDGKPVNLGLWDTA | | |
| | | GQEDYDRLRPLSYPQ | | |
| | | TVGET (SEQ ID NO: | | |
| | | 38) | | |
| SF3B1 | K700E | AVCKSKKSWQARHT | GLVDEQQEV (A02.01) (SEQ ID NO: 1770) | AML associated with |
| | | GIKIVQQIAILMGCAIL | | MDS; Chronic |
| | | PHLRSLVEIIEHGLVD | | lymphocytic |
| | | EQQEVRTISALAIAAL | | leukaemia-small |
| | | AEAATPYGIESFDSVL | | lymphocytic |
| | | KPLWKGIRQHRGKGL | | lymphoma; |
| | | AAFLKAI (SEQ ID NO: | | Myelodysplastic |
| | | 1728) | | syndrome; AML; |
| | | | | Luminal NS |
| | | | | carcinoma of breast; |
| | | | | Chronic myeloid |
| | | | | leukaemia; Ductal |
| | | | | carcinoma of |
| | | | | pancreas; Chronic |
| | | | | myelomonocytic |
| | | | | leukaemia; Chronic |
| | | | | lymphocytic |
| | | | | leukaemia-small |
| | | | | lymphocytic |
| | | | | lymphoma; |
| | | | | Myelofibrosis; |
| | | | | Myelodysplastic |
| | | | | syndrome; PRAD; |
| | | | | Essential |
| | | | | thrombocythaemia; |
| | | | | Medullomyoblastoma |
| SPOP | F133L | YLSLYLLLVSCPKSEV | FVQGKDWGL (A02.01, B08.01) (SEQ ID | PRAD |
| | | RAKFKFSILNAKGEET | NO: 1771) | |
| | | KAMESQRAYRFVQG | | |
| | | KDWGLKKFIRRDFLL | | |
| | | DEANGLLPDDKLTLF | | |
| | | CEVSVVQDSVNISGQ | | |
| | | NTMNMVKVPE (SEQ | | |
| | | ID NO: 1729) | | |
| SPOP | F133V | YLSLYLLLVSCPKSEV | FVQGKDWGV (A02.01) (SEQ ID NO: 1772) | PRAD |
| | | RAKFKFSILNAKGEET | | |
| | | KAMESQRAYRFVQG | | |
| | | KDWGVKKFIRRDFLL | | |
| | | DEANGLLPDDKLTLF | | |
| | | CEVSVVQDSVNISGQ | | |
| | | NTMNMVKVPE (SEQ | | |
| | | ID NO: 1730) | | |
| TP53 | G245S | IRVEGNLRVEYLDDR | CMGSMNRRPI (A02.01, B08.01) (SEQ ID | BLCA, BRCA, CRC, |
| | | NTFRHSVVVPYEPPE | NO: 216) | GBM, HNSC, LUSC, |
| | | VGSDCTTIHYNYMCN | GSMNRRPIL (B08.01) (SEQ ID NO: 208) | PAAD, PRAD |
| | | SSCMGSMNRRPILTII | MGSMNRRPI (B08.01) (SEQ ID NO: 209) | |
| | | TLEDSSGNLLGRNSFE | MGSMNRRPIL (B08.01) (SEQ ID NO: 214) | |
| | | VRVCACPGRDRRTEE | SMNRRPILTI (A02.01, A24.02, B08.01) (SEQ | |
| | | ENLRKKGEP (SEQ ID | ID NO: 211) | |
| | | NO: 39) | | |
| TP53 | R248Q | EGNLRVEYLDDRNTF | CMGGMNQRPI (A02.01, B08.01) (SEQ ID | BLCA, BRCA, CRC, |
| | | RHSVVVPYEPPEVGS | NO: 222) | GBM, HNSC, KIRC, |
| | | DCTTIHYNYMCNSSC | GMNQRPILTI (A02.01, B08.01) (SEQ ID NO: | LIHC, LUSC, |
| | | MGGMNQRPILTIITLE | 223) | PAAD, PRAD, |
| | | DSSGNLLGRNSFEVR | NQRPILTII (A02.01, B08.01) (SEQ ID NO: | UCEC |
| | | VCACPGRDRRTEEEN | 221) | |
| | | LRKKGEPHHE (SEQ | | |
| | | ID NO: 41) | | |
| TP53 | R248W | EGNLRVEYLDDRNTF | CMGGMNWRPI (A02.01, A24.02, B08.01) | BLCA, BRCA, CRC, |
| | | RHSVVVPYEPPEVGS | (SEQ ID NO: 230) | GBM, HNSC, LIHC, |
| | | DCTTIHYNYMCNSSC | GMNWRPILTI (A02.01, B08.01) (SEQ ID | LUSC, PAAD, |
| | | MGGMNWRPILTIITLE | NO: 231) | SKCM, UCEC |
| | | DSSGNLLGRNSFEVR | MNWRPILTI (A02.01, A24.02, B08.01) (SEQ | |
| | | VCACPGRDRRTEEEN | ID NO: 229) | |
| | | LRKKGEPHHE (SEQ | MNWRPILTII (A02.01, A24.02) (SEQ ID NO: | |
| | | ID NO: 42) | 233) | |
| TP53 | R273C | PEVGSDCTTIHYNYM | NSEEVCVCA (A02.01) (SEQ ID NO: 235) | BLCA, BRCA, CRC, |
| | | CNSSCMGGMNRRPIL | | GBM, HNSC, LUSC, |
| | | TIITLEDSSGNLLGRN | | PAAD, UCEC |
| | | SFEVCVCACPGRDRR | | |
| | | TEEENLRKKGEPHHE | | |
| | | LPPGSTKRALPNNTSS | | |
| | | SPQPKKKPL (SEQ ID | | |
| | | NO: 43) | | |
| TP53 | R273H | PEVGSDCTTIHYNYM | NSFEVHVCA (A02.01) (SEQ ID NO: 1773) | BRCA, CRC, GBM, |
| | | CNSSCMGGMNRRPIL | | HNSC, LIHC, LUSC, |
| | | TIITLEDSSGNLLGRN | | PAAD, UCEC |
| | | SFEVHVCACPGRDRR | | |
| | | TEEENLRKKGEPHHE | | |
| | | LPPGSTKRALPNNTSS | | |
| | | SPQPKKKPL (SEQ ID | | |
| | | NO: 1731) | | |
| TP53 | Y220C | TEVVRRCPHHERCSD | VVPCEPPEV (A02.01) (SEQ ID NO: 1774) | BLCA, BRCA, |
| | | SDGLAPPQHLIRVEG | VVVPCEPPEV (A02.01) (SEQ ID NO: 1775) | GBM, HNSC, LIHC, |
| | | NLRVEYLDDRNTFRH | | LUAD, LUSC, |
| | | SVVVPCEPPEVGSDC | | PAAD, SKCM, |
| | | TTIHYNYMCNSSCMG | | UCEC |
| | | GMNRRPILTIITLEDSS | | |
| | | GNLLGRNSF (SEQ ID | | |
| | | NO: 1732) | | |
| | | MSI-ASSOCIATED | | |
| Table 2B | | FRAMESHIFTS¹ | | |
| MSH6 | F1088fs; +1 | YNFDKNYKDWQSAV | ILLPEDTPPL (A02.01) (SEQ ID NO: 1776) | MSI+ CRC, MSI+ |
| | | ECIAVLDVLLCLANY | LLPEDTPPL (A02.01) (SEQ ID NO: 1777) | Uterine/Endometrium |
| | | SRGGDGPMCRPVILL | | Cancer, MSI+ |
| | | PEDTPPLLRA (SEQ ID | | Stomach Cancer, |
| | | NO: 1733) | | Lynch syndrome |
| Table 2C | | FRAMESHIFT¹ | | |
| APC | F1354fs | AKFQQCHSTLEPNPA | APFRVNHAV (B07.02) (SEQ ID NO: 301) | CRC, LUAD, UCEC, |
| | | DCRVLVYLQNQPGTK | CLADVLLSV (A02.01) (SEQ ID NO: 303) | STAD |
| | | LLNFLQERNLPPKVV | FLQERNLPPK (A03.01) (SEQ ID NO: 307) | |
| | | LRHPKVHLNTMFRRP | HLIVLRVVRL (A02.01, B08.01) (SEQ ID | |
| | | HSCLADVLLSVHLIVL | NO: 310) | |
| | | RVVRLPAPFRVNHAV | HPKVHLNTM (B07.02, B08.01) (SEQ ID | |
| | | EW* (SEQ ID NO: 44) | NO: 312) | |
| | | | HPKVHLNTMF (B07.02, B08.01) (SEQ ID | |
| | | | NO: 313) | |
| | | | KVHLNTMFR (A03.01) (SEQ ID NO: 315) | |
| | | | KVHLNTMFRR (A03.01) (SEQ ID NO: 316) | |
| | | | LPAPFRVNHA (B07.02) (SEQ ID NO: 321) | |
| | | | MFRRPHSCL (B07.02, B08.01) (SEQ ID NO: | |
| | | | 326) | |
| | | | MFRRPHSCLA (B08.01) (SEQ ID NO: 327) | |
| | | | NTMFRRPHSC (B08.01) (SEQ ID NO: 329) | |
| | | | RPHSCLADV (B07.02) (SEQ ID NO: 334) | |
| | | | RPHSCLADVL (B07.02) (SEQ ID NO: 335) | |
| | | | RVVRLPAPFR (A03.01) (SEQ ID NO: 337) | |
| | | | SVHLIVLRV (A02.01) (SEQ ID NO: 339) | |
| | | | TMFRRPHSC (B08.01) (SEQ ID NO: 341) | |
| | | | TMFRRPHSCL (A02.01, B08.01) (SEQ ID | |
| | | | NO: 342) | |
| | | | VLLSVHLIV (A02.01) (SEQ ID NO: 344) | |
| | | | VLLSVHLIVL (A02.01) (SEQ ID NO: 345) | |
| | | | VLRVVRLPA (B08.01) (SEQ ID NO: 347) | |
| | | | VVRLPAPFR (A03.01) (SEQ ID NO: 348) | |
| ARID1A | Y1324fs | ALGPHSRISCLPTQTR | AMPILPLPQL (A02.01) (SEQ ID NO: 356) | STAD, UCEC, |
| | | GCILLAATPRSSSSSSS | APLLAAPSPA (B07.02) (SEQ ID NO: 357) | BLCA, BRCA, |
| | | NDMIPMAISSPPKAPL | APRTNFHSS (B07.02) (SEQ ID NO: 358) | LUSC, CESC, KIRC, |
| | | LAAPSPASRLQCINSN | APRTNFHSSL (B07.02, B08.01) (SEQ ID | UCS |
| | | SRITSGQWMAHMAL | NO: 359) | |
| | | LPSGTKGRCTACHTA | CPQPSPSLPA (B07.02) (SEQ ID NO: 364) | |
| | | LGRGSLSSSSCPQPSP | GQWMAHMAL (A02.01) (SEQ ID NO: 371) | |
| | | SLPASNKLPSLPLSKM | GQWMAHMALL (A02.01) (SEQ ID NO: | |
| | | YTTSMAMPILPLPQLL | 372) | |
| | | LSADQQAAPRTNFHS | HMALLPSGTK (A03.01) (SEQ ID NO: 376) | |
| | | SLAETVSLHPLAPMPS | HTALGRGSL (B07.02) (SEQ ID NO: 379) | |
| | | KTCHHK* (SEQ ID | IPMAISSPP (B07.02) (SEQ ID NO: 383) | |
| | | NO: 47) | IPMAISSPPK (B07.02) (SEQ ID NO: 384) | |
| | | | KLPSLPLSK (A03.01) (SEQ ID NO: 390) | |
| | | | KLPSLPLSKM (A02.01) (SEQ ID NO: 391) | |
| | | | KMYTTSMAM (A02.01, A03.01) (SEQ ID | |
| | | | NO: 392) | |
| | | | LLAAPSPASR (A03.01) (SEQ ID NO: 399) | |
| | | | LLLSADQQAA (A02.01) (SEQ ID NO: 400) | |
| | | | LLSADQQAA (A02.01) (SEQ ID NO: 401) | |
| | | | LPASNKLPS (B07.02) (SEQ ID NO: 402) | |
| | | | LPASNKLPSL (B07.02, B08.01) (SEQ ID NO: | |
| | | | 403) | |
| | | | LPLPQLLLSA (B07.02) (SEQ ID NO: 405) | |
| | | | LPSLPLSKM (B07.02) (SEQ ID NO: 406) | |
| | | | LSKMYTTSM (B08.01) (SEQ ID NO: 412) | |
| | | | MALLPSGTK (A03.01) (SEQ ID NO: 418) | |
| | | | MPILPLPQL (B07.02) (SEQ ID NO: 419) | |
| | | | MPILPLPQLL (B07.02) (SEQ ID NO: 420) | |
| | | | MYTTSMAMPI (A24.02) (SEQ ID NO: 422) | |
| | | | PMAISSPPK (A03.01) (SEQ ID NO: 423) | |
| | | | QWMAHMALL (A24.02) (SEQ ID NO: 427) | |
| | | | SKMYTTSMAM (B07.02) (SEQ ID NO: 445) | |
| | | | SMAMPILPL (A02.01, B07.02, B08.01) (SEQ | |
| | | | ID NO: 446) | |
| | | | SNKLPSLPL (B08.01) (SEQ ID NO: 447) | |
| | | | SPASRLQCI (B07.02, B08.01) (SEQ ID NO: | |
| | | | 448) | |
| | | | SPPKAPLLAA (B07.02) (SEQ ID NO: 449) | |
| | | | SPSLPASNKL (B07.02) (SEQ ID NO: 450) | |
| | | | YTTSMAMPI (A02.01) (SEQ ID NO: 478) | |
| | | | YTTSMAMPIL (A02.01) (SEQ ID NO: 479) | |
| ARID1A | G1848fs | RSYRRMIHLWWTAQI | CLPGLTHPA (A02.01) (SEQ ID NO: 1778) | STAD, UCEC, |
| | | SLGVCRSLTVACCTG | GLTHPAHQPL (A02.01) (SEQ ID NO: 1779) | BLCA, BRCA, |
| | | GLVGGTPLSISRPTSR | HPAHQPLGSM (B07.02) (SEQ ID NO: 1780) | LUSC, CESC, KIRC, |
| | | ARQSCCLPGLTHPAH | LTHPAHQPL (B07.02) (SEQ ID NO: 1781) | UCS |
| | | QPLGSM* (SEQ ID | RPTSRARQSC (B07.02) (SEQ ID NO: 1782) | |
| | | NO: 1734) | RQSCCLPGL (A02.01) (SEQ ID NO: 1783) | |
| | | | TSRARQSCCL (B08.01) (SEQ ID NO: 1784) | |
| β2M | L13fs | QHSGRDVSLRGLSCA | ELLCVWVSSI (A02.01) (SEQ ID NO: 483) | CRC, STAD, SKCM, |
| | | RATLSFWPGGYPAYS | EWKVKFPEL (B08.01) (SEQ ID NO: 484) | HNSC |
| | | KDSGLLTSSSREWKV | KFPELLCVW (A24.02) (SEQ ID NO: 488) | |
| | | KFPELLCVWVSSIRH* | LLCVWVSSI (A02.01) (SEQ ID NO: 142) | |
| | | (SEQ ID NO: 1735) | LLTSSSREWK (A03.01) (SEQ ID NO: 497) | |
| | | | LTSSSREWK (A03.01) (SEQ ID NO: 499) | |
| | | | YPAYSKDSGL (B07.02) (SEQ ID NO: 513) | |
| GATA3 | L328fs | AQAKAVCSQESRDVL | CLQCLWALL (A02.01) (SEQ ID NO: 1785) | Breast Cancer |
| | N334fs | CELSDHHNHTLEEEC | CQWGPCLQCL (A02.01) (SEQ ID NO: 1786) | |
| | | QWGPCLQCLWALLQ | QWGPCLQCL (A24.02) (SEQ ID NO: 1787) | |
| | | ASQY* (SEQ ID NO: | QWGPCLQCLW (A24.02) (SEQ ID NO: | |
| | | 1736) | 1788) | |
| GATA3 | H400fs | PGRPLQTHVLPEPHL | AIQPVLWTT (A02.01) (SEQ ID NO: 519) | Breast Cancer |
| | S408fs | ALQPLQPHADHAHA | ALQPLQPHA (A02.01) (SEQ ID NO: 520) | |
| | S408fs | DAPAIQPVLWTTPPL | DLHFCRSSIM (B08.01) (SEQ ID NO: 528) | |
| | S430fs | QHGHRHGLEPCSMLT | EPHLALQPL (B07.02, B08.01) (SEQ ID NO: | |
| | H434fs | GPPARVPAVPFDLHF | 529) | |
| | H435fs | CRSSIMKPKRDGYMF | ESKIMFATL (B08.01) (SEQ ID NO: 530) | |
| | | LKAESKIMFATLQRSS | FATLQRSSL (B07.02, B08.01) (SEQ ID NO: | |
| | | LWCLCSNH* (SEQ ID | 531) | |
| | | NO: 60) | FLKAESKIM (B08.01) (SEQ ID NO: 535) | |
| | | | FLKAESKIMF (B08.01) (SEQ ID NO: 536) | |
| | | | GPPARVPAV (B07.02) (SEQ ID NO: 537) | |
| | | | IMKPKRDGYM (B08.01) (SEQ ID NO: 550) | |
| | | | KIMFATLQR (A03.01) (SEQ ID NO: 552) | |
| | | | KPKRDGYMF (B07.02) (SEQ ID NO: 553) | |
| | | | KPKRDGYMFL (B07.02) (SEQ ID NO: 554) | |
| | | | LHFCRSSIM (B08.01) (SEQ ID NO: 556) | |
| | | | LQHGHRHGL (B08.01) (SEQ ID NO: 559) | |
| | | | MFATLQRSSL (B07.02, B08.01) (SEQ ID | |
| | | | NO: 567) | |
| | | | MFLKAESKI (A24.02) (SEQ ID NO: 568) | |
| | | | MLTGPPARV (A02.01) (SEQ ID NO: 572) | |
| | | | QPVLWTTPPL (B07.02) (SEQ ID NO: 580) | |
| | | | SMLTGPPARV (A02.01) (SEQ ID NO: 141) | |
| | | | TLQRSSLWCL (A02.01) (SEQ ID NO: 592) | |
| | | | VLPEPHLAL (A02.01) (SEQ ID NO: 594) | |
| | | | VPAVPFDLHF (B07.02) (SEQ ID NO: 595) | |
| | | | YMELKAESK (A03.01) (SEQ ID NO: 597) | |
| | | | YMELKAESKI (A02.01, A03.01, A24.02, | |
| | | | B08.01) (SEQ ID NO: 598) | |
| MLL2 | P647s | TRRCHCCPHLRSHPC | APGPRGRTC (B07.02) (SEQ ID NO: 599) | STAD, BLCA, CRC, |
| | L656fs | PHHLRNHPRPHHLRH | CLRSHTCPPR (A03.01) (SEQ ID NO: 601) | HNSC, BRCA |
| | | HACHHHLRNCPHPHF | CLWCHACLHR (A03.01) (SEQ ID NO: 602) | |
| | | LRHCTCPGRWRNRPS | CPHLGSHPC (B07.02) (SEQ ID NO: 603) | |
| | | LRRLRSLLCLPHLNH | CPLGLKSPL (B07.02) (SEQ ID NO: 605) | |
| | | HLFLHWRSRPCLHRK | CPRSCRCPH (B07.02) (SEQ ID NO: 610) | |
| | | SHPHLLHLRRLYPHH | CPRSCRCPHL (B07.02, B08.01) (SEQ ID | |
| | | LKHRPCPHHLKNLLC | NO: 611) | |
| | | PRHLRNCPLPRHLKH | CSLPLGNHPY (A01.01) (SEQ ID NO: 612) | |
| | | LACLHHLRSHPCPLH | GLRNRICPL (A02.01, B07.02, B08.01) (SEQ | |
| | | LKSHPCLHHRRHLVC | ID NO: 620) | |
| | | SHHLKSLLCPLHLRSL | GLRSHTYLR (A03.01) (SEQ ID NO: 622) | |
| | | PFPHHLRHHACPHHL | GLRSHTYLRR (A03.01) (SEQ ID NO: 623) | |
| | | RTRLCPHHLKNHLCP | GPRGRTCHPG (B07.02) (SEQ ID NO: 1789) | |
| | | PHLRYRAYPPCLWCH | HLGSHPCRL (B08.01) (SEQ ID NO: 628) | |
| | | ACLHRLRNLPCPHRL | HLRLHASPH (A03.01) (SEQ ID NO: 630) | |
| | | RSLPRPLHLRLHASPH | HLRSCPCSL (B07.02, B08.01) (SEQ ID NO: | |
| | | HLRTPPHPHHLRTHL | 632) | |
| | | LPHHRRTRSCPCRWR | HLRTHLLPH (A03.01) (SEQ ID NO: 633) | |
| | | SHPCCHYLRSRNSAP | HLRTHLLPHH (A03.01) (SEQ ID NO: 634) | |
| | | GPRGRTCHPGLRSRT | HLRYRAYPP (B08.01) (SEQ ID NO: 637) | |
| | | CPPGLRSHTYLRRLRS | HLRYRAYPPC (B08.01) (SEQ ID NO: 638) | |
| | | HTCPPSLRSHAYALC | HPHHLRTHL (B07.02) (SEQ ID NO: 640) | |
| | | LRSHTCPPRLRDHICP | HPHHLRTHLL (B07.02, B08.01) (SEQ ID | |
| | | LSLRNCTCPPRLRSRT | NO: 641) | |
| | | CLLCLRSHACPPNLR | HTYLRRLRSH (A03.01) (SEQ ID NO: 644) | |
| | | NHTCPPSLRSHACPPG | LPCPHRLRSL (B07.02, B08.01) (SEQ ID NO: | |
| | | LRNRICPLSLRSHPCP | 651) | |
| | | LGLKSPLRSQANALH | LPHHRRTRSC (B07.02, B08.01) (SEQ ID | |
| | | LRSCPCSLPLGNHPYL | NO: 653) | |
| | | PCLESQPCLSLGNHLC | LPLGNHPYL (B07.02) (SEQ ID NO: 654) | |
| | | PLCPRSCRCPHLGSHP | LPRPLHLRL (B07.02, B08.01) (SEQ ID NO: | |
| | | CRLS* (SEQ ID NO: | 655) | |
| | | 62) | NLRNHTCPP (B08.01) (SEQ ID NO: 677) | |
| | | | PPRLRSRTCL (B07.02, B08.01) (SEQ ID NO: | |
| | | | 679) | |
| | | | RLHASPHHL (A02.01) (SEQ ID NO: 685) | |
| | | | RLHASPHHLR (A03.01) (SEQ ID NO: 686) | |
| | | | RLRDHICPL (A02.01, B07.02, B08.01) (SEQ | |
| | | | ID NO: 687) | |
| | | | RLRNLPCPH (A03.01) (SEQ ID NO: 689) | |
| | | | RLRNLPCPHR (A03.01) (SEQ ID NO: 690) | |
| | | | RLRSHTCPP (B08.01) (SEQ ID NO: 691) | |
| | | | RLRSLPRPL (B07.02, B08.01) (SEQ ID NO: | |
| | | | 693) | |
| | | | RLRSLPRPLH (A03.01) (SEQ ID NO: 694) | |
| | | | RLRSRTCLL (B07.02, B08.01) (SEQ ID NO: | |
| | | | 695) | |
| | | | RNRICPLSL (B07.02, B08.01) (SEQ ID NO: | |
| | | | 701) | |
| | | | RPLHLRLHA (B07.02) (SEQ ID NO: 703) | |
| | | | RPLHLRLHAS (B07.02) (SEQ ID NO: 704) | |
| | | | RSHACPPGLR (A03.01) (SEQ ID NO: 708) | |
| | | | RSHACPPNLR (A03.01) (SEQ ID NO: 710) | |
| | | | RSHAYALCLR (A03.01) (SEQ ID NO: 712) | |
| | | | RSHPCCHYLR (A03.01) (SEQ ID NO: 714) | |
| | | | RSHPCPLGLK (A03.01) (SEQ ID NO: 716) | |
| | | | RSHTCPPSLR (A03.01) (SEQ ID NO: 720) | |
| | | | RSLPRPLHLR (A03.01) (SEQ ID NO: 724) | |
| | | | RSRTCLLCL (B07.02) (SEQ ID NO: 729) | |
| | | | RSRTCLLCLR (A03.01) (SEQ ID NO: 730) | |
| | | | RSRTCPPGL (B07.02) (SEQ ID NO: 731) | |
| | | | RSRTCPPGLR (A03.01) (SEQ ID NO: 732) | |
| | | | RTHLLPHHRR (A03.01) (SEQ ID NO: 735) | |
| | | | RTRSCPCRWR (A03.01) (SEQ ID NO: 739) | |
| | | | RYRAYPPCL (A24.02) (SEQ ID NO: 742) | |
| | | | RYRAYPPCLW (A24.02) (SEQ ID NO: 743) | |
| | | | SLGNHLCPL (A02.01, B07.02, B08.01) (SEQ | |
| | | | ID NO: 745) | |
| | | | SLPLGNHPYL (A02.01) (SEQ ID NO: 747) | |
| | | | SLPRPLHLRL (A02.01) (SEQ ID NO: 749) | |
| | | | SLRNCTCPPR (A03.01) (SEQ ID NO: 750) | |
| | | | SLRSHAYAL (A02.01, B07.02, B08.01) (SEQ | |
| | | | ID NO: 752) | |
| | | | SLRSHPCPL (A02.01, B07.02, B08.01) (SEQ | |
| | | | ID NO: 754) | |
| | | | SPHHLRTPP (B07.02) (SEQ ID NO: 756) | |
| | | | SPHHLRTPPH (B07.02) (SEQ ID NO: 757) | |
| | | | SPLRSQANAL (B07.02, B08.01) (SEQ ID | |
| | | | NO: 759) | |
| | | | YLRRLRSHTC (B08.01) (SEQ ID NO: 768) | |
| | | | YLRSRNSAP (B08.01) (SEQ ID NO: 769) | |
| | | | YLRSRNSAPG (B08.01) (SEQ ID NO: 770) | |
| MLL2 | P2354fs | GPRSHPLPRLWHLLL | ALAPTLTHM (A02.01) (SEQ ID NO: 1790) | STAD, BLCA, CRC, |
| | | QVTQTSFALAPTLTH | ALAPTLTHML (A02.01) (SEQ ID NO: 1791) | HNSC, BRCA |
| | | MLSPH* (SEQ ID NO: | LLQVTQTSFA (A02.01) (SEQ ID NO: 1792) | |
| | | 1737) | LQVTQTSFAL (A02.01) (SEQ ID NO: 1793) | |
| | | | RLWHLLLQV (A02.01) (SEQ ID NO: 1794) | |
| | | | RLWHLLLQVT (A02.01) (SEQ ID NO: 1795) | |
| RNF43 | G659fs | PLGLVPWTRWCPQG | CTQLARFFPI (A24.02) (SEQ ID NO: 1796) | STAD |
| | | KPRFPAMSTTTATGT | FFPITPPVW (A24.02) (SEQ ID NO: 1797) | |
| | | TTTKSGSSGMAGSLA | FPITPPVWHI (B07.02) (SEQ ID NO: 1798) | |
| | | QKPESPSPGLLFLGHS | GPRMQLCTQL (B07.02, B08.01) (SEQ ID | |
| | | PSQSHLLLISKSPDPT | NO: 1799) | |
| | | QQPLRGGSLTHSAPG | ITPPVWHIL (A24.02) (SEQ ID NO: 1800) | |
| | | PSLSQPLAQLTPPASA | LALGPRMQL (B07.02) (SEQ ID NO: 1801) | |
| | | PVPAVCSTCKNPASLP | MQLCTQLARF (A24.02) (SEQ ID NO: 1802) | |
| | | DTHRGKGGGVPPSPP | RFFPITPPV (A02.01, A24.02) (SEQ ID NO: | |
| | | LALGPRMQLCTQLAR | 1803) | |
| | | FFPITPPVWHILGPQR | RFFPITPPVW (A24.02) (SEQ ID NO: 1804) | |
| | | HTP* (SEQ ID NO: | RMQLCTQLA (A02.01) (SEQ ID NO: 1805) | |
| | | 1738) | RMQLCTQLAR (A03.01) (SEQ ID NO: 1806) | |
| | | | SPPLALGPRM (B07.02) (SEQ ID NO: 1807) | |
| | | | TQLARFFPI (A02.01, A24.02, B08.01) (SEQ | |
| | | | ID NO: 1808) | |
| SMAP1 | E169fs | KYEKKKYYDKNAIAI | KSRQNHLQL (B07.02) (SEQ ID NO: 275) | MSI+ CRC, MSI+ |
| | | TNISSSDAPLQPLVSSP | ALKKLRSPL (B08.01, B07.02) (SEQ ID NO: | Uterine/Endometrium |
| | | SLQAAVDKNKLEKEK | 267) | Cancer, MSI+ |
| | | EKKRKRKREKRSQKS | HLQLKSCRRK (A03.01) (SEQ ID NO: 291) | Stomach Cancer |
| | | RQNHLQLKSCRRKIS | KISNWSLKK (A03.01, A11.01) (SEQ ID NO: | |
| | | NWSLKKVPALKKLRS | 268) | |
| | | PLWIF (SEQ ID NO: | KISNWSLKKV (A03.01) (SEQ ID NO: 285) | |
| | | 111) | KLRSPLWIF (A24.02) (SEQ ID NO: 270) | |
| | | | KSRQNHLQLK (A03.01) (SEQ ID NO: 286) | |
| | | | NWSLKKVPAL (B08.01) (SEQ ID NO: 294) | |
| | | | SLKKVPALK (A03.01, A11.01) (SEQ ID NO: | |
| | | | 269) | |
| | | | SLKKVPALKK (A03.01) (SEQ ID NO: 287) | |
| | | | SQKSRQNHL (B08.01) (SEQ ID NO: 274) | |
| | | | WSLKKVPAL (B08.01) (SEQ ID NO: 280) | |
| | | | WSLKKVPALK (A03.01) (SEQ ID NO: 288) | |
| TP53 | P58fs | CCPRTILNNGSLKTQV | KLPECQRLL (A02.01) (SEQ ID NO: 787) | BRCA, CRC, LUAD, |
| | P72fs | QMKLPECQRLLPPWP | KPTRAATVSV (B07.02) (SEQ ID NO: 788) | PRAD, HNSC, |
| | G108fs | LHQQLLHRRPLHQPP | LPPWPLHQQL (B07.02) (SEQ ID NO: 793) | LUSC, PAAD, |
| | R110fs | PGPCHLLSLPRKPTRA | LPRKPTRAA (B07.02, B08.01) (SEQ ID NO: | STAD, BLCA, OV, |
| | | ATVSVWASCILGQPS | 794) | LIHC, SKCM, |
| | | L* (SEQ ID NO: 74) | LPRKPTRAAT (B07.02) (SEQ ID NO: 795) | UCEC, LAML, UCS, |
| | | | QQLLHRRPL (B08.01) (SEQ ID NO: 803) | KICH, GBM, ACC |
| | | | RLLPPWPLH (A03.01) (SEQ ID NO: 808) | |
| TP53 | P152fs | LARTPLPSTRCFANW | APASAPWPST (B07.02) (SEQ ID NO: 778) | BRCA, CRC, LUAD, |
| | | PRPALCSCGLIPHPRP | APWPSTSSH (B07.02) (SEQ ID NO: 780) | PRAD, HNSC, |
| | | APASAPWPSTSSHST* | RPAPASAPW (B07.02) (SEQ ID NO: 810) | LUSC, PAAD, |
| | | (SEQ ID NO: 76) | WPSTSSHST (B07.02) (SEQ ID NO: 831) | STAD, BLCA, OV, |
| | | | | LIHC, SKCM, |
| | | | | UCEC, LAML, UCS, |
| | | | | KICH, GBM, ACC |
| UBR5 | K2120fs | SQGLYSSSASSGKCL | RVQNQGHLL (B07.02) (SEQ ID NO: 1809) | |
| | | MEVTVDRNCLEVLPT | | |
| | | KMSYAANLKNVMN | | |
| | | MQNRQKKKGKNSPC | | |
| | | CQKKLRVQNQGHLL | | |
| | | MILLHN* (SEQ ID NO: | | |
| | | 1739) | | |
| VHL | L116fs | TRASPPRSSSAIAVRA | FLPISHCQCI (A02.01) (SEQ ID NO: 843) | KIRC, KIRP |
| | G123fs | SCCPYGSTSTASRSPT | FWLTKLNYL (A24.02, B08.01) (SEQ ID NO: | |
| | | QRCRLARAAASTATE | 845) | |
| | | VTFGSSEMQGHTMGF | HLSMLTDSL (A02.01) (SEQ ID NO: 849) | |
| | | WLTKLNYLCHLSMLT | HTMGFWLTK (A03.01) (SEQ ID NO: 852) | |
| | | DSLFLPISHCQCIL* | HTMGFWLTKL (A02.01) (SEQ ID NO: 853) | |
| | | (SEQ ID NO: 80) | KLNYLCHLSM (A02.01) (SEQ ID NO: 855) | |
| | | | LPISHCQCI (B07.02, B08.01) (SEQ ID NO: | |
| | | | 859) | |
| | | | LPISHCQCIL (B07.02, B08.01) (SEQ ID NO: | |
| | | | 860) | |
| | | | LTDSLFLPI (A01.01, A02.01) (SEQ ID NO: | |
| | | | 863) | |
| | | | LTKLNYLCHL (B08.01) (SEQ ID NO: 864) | |
| | | | MLTDSLFLPI (A01.01, A02.01, B08.01) | |
| | | | (SEQ ID NO: 866) | |
| | | | MQGHTMGFWL (A02.01) (SEQ ID NO: 868) | |
| | | | NYLCHLSML (A24.02) (SEQ ID NO: 869) | |
| | | | SMLTDSLFL (A02.01) (SEQ ID NO: 877) | |
| | | | TMGFWLTKL (A02.01) (SEQ ID NO: 881) | |
| | | | YLCHLSMLT (A02.01) (SEQ ID NO: 884) | |
| TABLE 2D | | INSERT¹ | | |
| HER2 | G776insYVMA | LGSGAFGTVYKGIWI | ILDEAYVMAY (A01.01) (SEQ ID NO: 1810) | Lung Cancer |
| | | PDGENVKIPVAIKVLR | VMAYVMAGV (A02.01) (SEQ ID NO: 1811) | |
| | | ENTSPKANKEILDEA | YVMAYVMAG (A02.01, B07.02, B08.01) | |
| | | YVMAYVMAGVGSPY | (SEQ ID NO: 1812) | |
| | | VSRLLGICLTSTVQLV | YVMAYVMAGV (A02.01, B07.02, B08.01) | |
| | | TQLMPYGCLLDHVRE | (SEQ ID NO: 1813) | |
| | | NRGRLGSQDLLNW | | |
| | | (SEQ ID NO: 1740) | | |

¹Underlined AAs represent non-native AAs
²Bolded AAs represent native AAs of the amino acid sequence encoded by the second of the two fused genes
³Bolded and underlined AAs represent non-native AAs of the amino acid sequence encoded by the second of the two fused genes due to a framshift.

[0613] In the Tables above, for one or more of the exemplary fusions, a sequence that comes before the first “:” belongs to an exon sequence of a polypeptide encoded by a first gene, a sequence that comes after the second “:” belongs to an exon sequence of a polypeptide encoded by a second gene, and an amino acid that appears between “:” symbols is encoded by a codon that is split between the exon sequence of a polypeptide encoded by a first gene and the exon sequence of a polypeptide encoded by a second gene. However, in some embodiments, for example, NAB:STAT6, the NAB exon is linked to the 5′ UTR of STAT6 and the first amino acid that appears after the junction is the normal start codon of STAT6 (there is no frame present at this site (as it is not normally translated)).

AR-V7 in the tables above can also be considered, in some embodiments, a splice variant of the AR gene that encodes a protein that lacks the ligand binding domain found in full length AR.

### Example 2: HLA Class I and Class II Binding Assays

[0614] The following example of peptide binding to HLA molecules demonstrates quantification of binding affinities of HLA class I and class II peptides. Binding assays can be performed with peptides that are either motif-bearing or not motif-bearing.

[0615] Epstein-Barr virus (EBV)-transformed homozygous cell lines, fibroblasts, CIR, or 721.22 transfectants are used as sources of HLA class I molecules. Cell lysates are prepared and HLA molecules purified in accordance with disclosed protocols (Sidney et al., Current Protocols in Immunology 18.3.1 (1998); Sidney, et al., J. Immunol. 154:247 (1995); Sette, et al., Mol. Immunol. 31:813 (1994)). HLA molecules are purified from lysates by affinity chromatography. The lysates are passed over a column of Sepharose CL-4B beads coupled to an appropriate antibody. The anti-HLA column is then washed with 10 mM Tris-HCL, pH 8.0, in 1% NP-40, PBS, and PBS containing 0.4% n-octylglucoside and HLA molecules are eluted with 50 mM diethylamine in 0.15 M NaCl containing 0.4% n-octylglucoside, pH 11.5. A 1/25 volume of 2.0 M Tris, pH 6.8, is added to the eluate to reduce the pH to ˜8.0. Eluates are then concentrated by centrifugation in Centriprep 30 concentrators (Amicon, Beverly, Mass.). Protein content is evaluated by a BCA protein assay (Pierce Chemical Co., Rockford, Ill.) and confirmed by SDS-PAGE.

[0616] A detailed description of the protocol utilized to measure the binding affinity of peptides to Class I and Class II MHC has been published (Sette et al., Mol. Immunol. 31:813, 1994; Sidney et al., in Current Protocols in Immunology, Margulies, Ed., John Wiley & Sons, New York, Section 18.3, 1998). Briefly, purified MHC molecules (5 to 500 nM) are incubated with various unlabeled peptide inhibitors and 1-10 nM ¹²⁵I-radiolabeled probe peptides for 48 h in PBS containing 0.05% Nonidet P-40 (NP40) (or 20% w/v digitonin for H-2 IA assays) in the presence of a protease inhibitor cocktail. All assays are at pH 7.0 with the exception of DRB 1*0301, which was performed at pH 4.5, and DRB 1*1601 (DR2w21β1) and DRB4*0101 (DRw53), which were performed at pH 5.0.

[0617] Following incubation, MHC-peptide complexes are separated from free peptide by gel filtration on 7.8 mm×15 cm TSK200 columns (TosoHaas 16215, Montgomeryville, Pa.). Because the large size of the radiolabeled peptide used for the DRB1*1501 (DR2w2β1) assay makes separation of bound from unbound peaks more difficult under these conditions, all DRB 1*1501 (DR2w2β1) assays were performed using a 7.8 mm×30 cm TSK2000 column eluted at 0.6 mLs/min. The eluate from the TSK columns is passed through a Beckman 170 radioisotope detector, and radioactivity is plotted and integrated using a Hewlett-Packard 3396A integrator, and the fraction of peptide bound is determined.

[0618] Radiolabeled peptides are iodinated using the chloramine-T method. Typically, in preliminary experiments, each MHC preparation is titered in the presence of fixed amounts of radiolabeled peptides to determine the concentration of HLA molecules necessary to bind 10-20% of the total radioactivity. All subsequent inhibition and direct binding assays are performed using these HLA concentrations.

[0619] Since under these conditions [label]<[HLA] and IC₅₀≥[HLA], the measured IC₅₀ values are reasonable approximations of the true K_{D} values. Peptide inhibitors are typically tested at concentrations ranging from 120 μg/ml to 1.2 ng/ml, and are tested in two to four completely independent experiments. To allow comparison of the data obtained in different experiments, a relative binding figure is calculated for each peptide by dividing the IC₅₀ of a positive control for inhibition by the IC₅₀ for each tested peptide (typically unlabeled versions of the radiolabeled probe peptide). For database purposes, and inter-experiment comparisons, relative binding values are compiled. These values can subsequently be converted back into IC₅₀ nM values by dividing the IC₅₀ nM of the positive controls for inhibition by the relative binding of the peptide of interest. This method of data compilation has proven to be the most accurate and consistent for comparing peptides that have been tested on different days, or with different lots of purified MHC.

[0620] Because the antibody used for HLA-DR purification (LB3.1) is α-chain specific, β1 molecules are not separated from β3 (and/or β4 and β5) molecules. The β1 specificity of the binding assay is obvious in the cases of DRB1*0101 (DR1), DRB1*0802 (DR8w2), and DRB1*0803 (DR8w3), where no β3 is expressed. It has also been demonstrated for DRB1*0301 (DR3) and DRB3*0101 (DR52a), DRB1*0401 (DR4w4), DRB1*0404 (DR4w14), DRB1*0405 (DR4w15), DRB1*1101 (DR5), DRB1*1201 (DR5w12), DRB1*1302 (DR6w19) and DRB1*0701 (DR7). The problem of β chain specificity for DRB1*1501 (DR2w2β1), DRB5*0101 (DR2w2β2), DRB1*1601 (DR2w21β1), DRB5*0201 (DR51Dw21), and DRB4*0101 (DRw53) assays is circumvented by the use of fibroblasts. Development and validation of assays with regard to DRβ molecule specificity have been described previously (see, e.g., Southwood et al., J. Immunol. 160:3363-3373, 1998).

[0621] A detailed description of the protocol utilized to measure the binding stability of peptides to Class I MHC has been published (Harndahl et al. J Immunol Methods. 374:5-12, 2011). Briefly, synthetic genes encoding biotinylated MHC-I heavy and light chains are expressed in E. coli and purified from inclusion bodies using standard methods. The light chain (β2m) is radio-labeled with iodine (¹²⁵I), and combined with the purified MHC-I heavy chain and peptide of interest at 18° C. to initiate pMHC-I complex formation. These reactions are carried out in streptavidin coated microplates to bind th biotinylated MHC-I heavy chains to the surface and allow measurement of radiolabeled light chain to monitor complex formation. Dissociation is initiated by addition of higher concentrations of unlabeled light-chain and incubation at 37° C. Stability is defined as the length of time in hours it takes for half of the complexes to dissociate, as measured by scintillation counts

[0622] Live cell/flow cytometry-based assays can also be used, e.g., an assay utilizing a TAP-deficient hybridoma cell line T2 (American Type Culture Collection (ATCC Accession No. CRL-1992), Manassas, Va.). TAP deficiency in this cell line leads to inefficient loading of MHCI in the ER and an excess of empty MHCIs. Salter and Cresswell, EMBO J. 5:943-49 (1986); Salter, Immunogenetics 21:235-46 (1985). Empty MHCIs are highly unstable and short-lived. When T2 cells are cultured at reduced temperatures, empty MHCIs appear transiently on the cell surface, where they can be stabilized by exogenous addition of MHCI-binding peptides. To perform this binding assay, peptide-receptive MHCIs were induced by culturing aliquots of 10⁷ T2 cells overnight at 26° C. in serum free AIM-V medium alone, or in medium containing escalating concentrations (0.1 to 100 μM) of peptide. Cells were then washed twice with PBS, and subsequently incubated with a fluorescent tagged HLA-A0201-specific monoclonal antibody, BB7.2, to quantify cell surface expression. Samples were acquired on a FACS Calibur instrument (Becton Dickinson) and the mean fluorescence intensity (MFI) determined using the accompanying Cellquest software.

### Example 3: HLA Class I Binding Affinity

[0623] HLA binding assays were used to evaluate either the affinity of interaction of a given epitope with a selected HLA molecule or the stability. Each of these measurements was, e.g., indicative of the ability of an epitope to elicit a CD8+ T cell response.

[0624] A subset of peptides from Table 1 (n=562) were synthesized and their affinity for their given HLA class I molecule was measured as described. The values are shown in Table 3. The measurements are plotted against the predicted affinity in FIG. 1. These data show a strong correlation between prediction and measurement (dotted line represents best fit, R²=0.45), demonstrating the value of the predictions. However, the outliers demonstrate the importance of these measurements. Thick vertical and horizontal lines are shown at 500 nM for the predicted affinity and observed affinity, respectively. 500 nM is commonly accepted in the field as the maximum affinity for an epitope that is a “weak binder” to HLA class I. Therefore, the points in the lower right quadrant (prediction greater than 500 nM, measurement less than 500 nM) are epitopes that were considered very weak binders but were observed to bind within an acceptable range. Epitopes in this quadrant (n=75) represent 30.5% of epitopes not considered to be binders by prediction (combination of bottom right and top right quadrants, n=246).

TABLE 3
HLA Class I Binding Affinity and Stability

| | | | | | Observed | |
|---|---|---|---|---|---|---|
| | | | | Predicted | Affinity | |
| | | | SEQ | affinity | (IC₅₀; | Stability |
| Mutation | Allele | Peptide | ID NO: | (IC₅₀; (nM)) | (nM)) | (T_{1/2} (h)) |
| ABL1, M351T | A02.01 | TQISSATEYL | 911 | 2921.0 | 2644.0 | 0 |
| ABL1, T315I | A02.01 | YIIIEFMTYG | 917 | 3502.0 | 186.0 | 0 |
| ABL1, T315I | A02.01 | IIIEFMTYG | 915 | 1991.0 | 779.0 | 0 |
| ABL1, T3151 | A02.01 | IIIEFMTYGN | 916 | 16793.0 | 1551.0 | 0 |
| ABL1, T315I | A02.01 | IIEFMTYGNL | 914 | 2134.0 | 9702.0 | 0 |
| ABL1, Y253H | A02.01 | KLGGGQHGEV | 919 | 1705.0 | 387.0 | 0.4 |
| AKT1, E17K | B08.01 | WLHKRGKYI | 1742 | 47.0 | 417.0 | 1.3 |
| AKT1, E17K | A02.01 | WLHKRGKYI | 1742 | 4972.0 | 1250.0 | 1.2 |
| AKT1, E17K | B07.02 | WLHKRGKYI | 1742 | 7185.0 | 2648.0 | 0 |
| ALK, G1269A | A02.01 | RVAKIADFGM | 921 | 5258.0 | 125.0 | 0.5 |
| ALK, G1269A | B07.02 | RVAKIADFGM | 921 | 7260.0 | 9723.0 | 0.2 |
| ALK, L1196M | A02.01 | SLPRFILMEL | 929 | 94.0 | 26.0 | 0.5 |
| ALK, L1196M | A02.01 | ILMELMAGG | 923 | 192.0 | 223.0 | 0.5 |
| ALK, L1196M | A02.01 | LMELMAGGDL | 925 | 5617.0 | 311.0 | 8.9 |
| ALK, L1196M | A02.01 | LQSLPRFILM | 928 | 2519.0 | 413.0 | 0 |
| ALK, L1196M | B07.02 | SLPRFILMEL | 929 | 17.0 | 583.0 | 0.4 |
| ALK, L1196M | B08.01 | LQSLPRFILM | 928 | 1288.0 | 1547.0 | 0 |
| ALK, L1196M | A02.01 | FILMELMAGG | 922 | 189.0 | 1580.0 | 0 |
| ALK, L1196M | B08.01 | SLPRFILMEL | 929 | 686.0 | 1762.0 | 0 |
| ALK, L1196M | A24.02 | SLPRFILMEL | 929 | 5143.0 | 2774.0 | 0.2 |
| ALK, L1196M | A02.01 | ILMELMAGGD | 924 | 5761.0 | 3451.0 | 0 |
| APC, AVEW | A02.01 | VLLSVHLIV | 344 | 36.0 | 72.0 | 11 |
| (SEQ ID NO: | | | | | | |
| 1814) | | | | | | |
| APC, AVEW | A02.01 | CLADVLLSV | 303 | 5.0 | 219.0 | 24 |
| (SEQ ID NO: | | | | | | |
| 1814) | | | | | | |
| APC, VHPA | A02.01 | KVLQMDFLV | 1200 | 25.0 | 11.0 | 6.4 |
| (SEQ ID NO: | | | | | | |
| 1815) | | | | | | |
| APC, VHPA | A02.01 | LQMDFLVHPA | 1202 | 26.0 | 68.0 | 1.5 |
| (SEQ ID NO: | | | | | | |
| 1815) | | | | | | |
| β2M, ...MPAV | A03.01 | TTLNSPPLKK | 1374 | 62.5 | 14.3 | not |
| (SEQ ID NO: | | | | | | measured |
| 1816) | | | | | | |
| β2M, ...MPAV | A03.01 | TTLNSPPLK | 1373 | 165.4 | 9.8 | not |
| (SEQ ID NO: | | | | | | measured |
| 1816) | | | | | | |
| β2M, ...MPAV | A03.01 | TLNSPPLKK | 1372 | 27.5 | 5.4 | not |
| (SEQ ID NO: | | | | | | measured |
| 1816) | | | | | | |
| β2M, ...MPAV | A03.01 | CTTLNSPPLK | 1369 | 225.3 | 63.6 | not |
| (SEQ ID NO: | | | | | | measured |
| 1816) | | | | | | |
| β2M, ...MPAV | B08.01 | CLSARTGLSI | 1368 | 1106.6 | 149.6 | not |
| (SEQ ID NO: | | | | | | measured |
| 1816) | | | | | | |
| β2M, ...MPAV | A02.01 | GLSISCTTL | 1370 | 669.0 | 114.5 | not |
| (SEQ ID NO: | | | | | | measured |
| 1816) | | | | | | |
| β2M, ...SIRH | A03.01 | LTSSSREWK | 499 | 413.9 | 117.8 | not |
| (SEQ ID NO: | | | | | | measured |
| 1817) | | | | | | |
| β2M, ...SIRH | A03.01 | LLTSSSREWK | 497 | 206.1 | 1769.8 | not |
| (SEQ ID NO: | | | | | | measured |
| 1817) | | | | | | |
| β2M, ...SIRH | B07.02 | YPAYSKDSGL | 513 | 41.1 | 79.5 | not |
| (SEQ ID NO: | | | | | | measured |
| 1817) | | | | | | |
| β2M, ...SIRH | B08.01 | EWKVKFPEL | 484 | 488.7 | 538.4 | not |
| (SEQ ID NO: | | | | | | measured |
| 1817) | | | | | | |
| β2M, ...SIRH | A24.02 | KFPELLCVW | 488 | 83.7 | 13.7 | not |
| (SEQ ID NO: | | | | | | measured |
| 1817) | | | | | | |
| β2M, ...SQIS | B08.01 | LQRFRFTHV | 1375 | 55.5 | 37.3 | not |
| (SEQ ID NO: | | | | | | measured |
| 1818) | | | | | | |
| β2M, ...SQIS | A24.02 | RLSSVLQRF | 1377 | 288.9 | 28.2 | not |
| (SEQ ID NO: | | | | | | measured |
| 1818) | | | | | | |
| β2M, ...SQIS | A02.01 | VLQRFRFTHV | 1379 | 163.4 | 106.7 | not |
| (SEQ ID NO: | | | | | | measured |
| 1818) | | | | | | |
| β2M, ...SQIS | B08.01 | VLQRFRFTHV | 1379 | 264.1 | 480.1 | not |
| (SEQ ID NO: | | | | | | measured |
| 1818) | | | | | | |
| β2M, ...SQIS | A03.01 | RLSSVLQRFR | 1378 | 168.1 | 12.5 | not |
| (SEQ ID NO: | | | | | | measured |
| 1818) | | | | | | |
| BCR:ABL | B08.01 | LTINKEEAL | 1687 | 4972.0 | 895.0 | 0 |
| (e13a2, aka | | | | | | |
| b2a2) | | | | | | |
| BCR:ABL | A02.01 | LTINKEEAL | 1687 | 12671.0 | 4413.0 | 0 |
| (e13a2, aka | | | | | | |
| b2a2) | | | | | | |
| BRAF, V600E | A02.01 | LATEKSRWSG | 931 | 39130.0 | 23337.0 | 0 |
| BRAF, V600E | B08.01 | LATEKSRWS | 930 | 24674.0 | 36995.0 | 0 |
| BRAF, V600E | B08.01 | LATEKSRWSG | 931 | 13368.0 | 46582.0 | 0 |
| BRAF, V600E | A02.01 | LATEKSRWS | 930 | 39109.0 | 60997.0 | 0 |
| BTK, C481S | A02.01 | SLLNYLREM | 935 | 48.0 | 87.0 | 3 |
| BTK, C481S | A02.01 | MANGSLLNYL | 934 | 2979.0 | 1082.0 | 0 |
| BTK, C481S | B07.02 | SLLNYLREM | 935 | 6544.0 | 1110.0 | 0 |
| BTK, C481S | B08.01 | SLLNYLREM | 935 | 1091.0 | 1230.0 | 0 |
| BTK, C481S | A02.01 | YMANGSLLN | 936 | 7856.0 | 4444.0 | 0 |
| BTK, C481S | B07.02 | MANGSLLNYL | 934 | 8921.0 | 17715.0 | 0 |
| BTK, C481S | B08.01 | MANGSLLNYL | 934 | 7639.0 | 19853.0 | 0 |
| BTK, C481S | A03.01 | MANGSLLNY | 933 | 1030.3 | 35.6 | not |
| | | | | | | measured |
| BTK, C481S | A01.01 | MANGSLLNY | 933 | 285.7 | 439.0 | not |
| | | | | | | measured |
| BTK, C481S | A24.02 | EYMANGSLL | 932 | 213.2 | 5.0 | not |
| | | | | | | measured |
| BTK, C481S | A01.01 | YMANGSLLNY | 937 | 95.7 | 13.2 | not |
| | | | | | | measured |
| BTK, C481S | A03.01 | YMANGSLLNY | 937 | 109.4 | 95.9 | not |
| | | | | | | measured |
| C11orf95:RELA | A02.01 | ELFPLIFPA | 1690 | 13.0 | 13.0 | 5.1 |
| C11orf95:RELA | A24.02 | KGPELFPLI | 1691 | 909.0 | 14.0 | 1.7 |
| C11orf95:RELA | A02.01 | KGPELFPLI | 1691 | 6840.0 | 101.0 | 0.3 |
| C11orf95:RELA | B08.01 | ELFPLIFPA | 1690 | 7316.0 | 449.0 | 0 |
| C15ORF40(+1) | A02.01 | KLFSCLSFL | 1066 | 6.0 | 6.0 | 14.3 |
| C15ORF40(+1) | A03.01 | KLFSCLSFL | 1066 | 1488.0 | 308.0 | 0.8 |
| C15ORF40(+1) | A03.01 | SLQPPPPGFK | 1074 | 26.3 | 19.0 | not |
| | | | | | | measured |
| C15ORF40(+1) | A03.01 | LFFFFFETK | 1069 | 658.4 | 413.3 | not |
| | | | | | | measured |
| C15ORF40(+1) | A02.01 | ALFFFFFET | 1056 | 28.9 | 470.7 | not |
| | | | | | | measured |
| C15ORF40(+1) | A03.01 | ALFFFFFETK | 1057 | 31.5 | 216.4 | not |
| | | | | | | measured |
| C15ORF40(+1) | A02.01 | FFFETKSCSV | 1062 | 754.5 | 61.2 | not |
| | | | | | | measured |
| C15ORF40(+1) | B08.01 | FFETKSCSV | 1061 | 807.6 | 7.6 | not |
| | | | | | | measured |
| C15ORF40(+1) | A01.01 | LSFLSSWDY | 1070 | 211.1 | 52.9 | not |
| | | | | | | measured |
| C15ORF40(+1) | A02.01 | FLSSWDYRRM | 1064 | 62.2 | 323.5 | not |
| | | | | | | measured |
| C15ORF40(+1) | A03.01 | LSFLSSWDYR | 1071 | 508.7 | 100.9 | not |
| | | | | | | measured |
| C15ORF40(+1) | A02.01 | FKLFSCLSFL | 1063 | 9.9 | 662.9 | not |
| | | | | | | measured |
| C15ORF40(+1) | A02.01 | VQWRSLGSL | 1075 | 986.0 | 4733.2 | not |
| | | | | | | measured |
| C15ORF40(+1) | A02.01 | KLFSCLSFLS | 1067 | 65.1 | 0.6 | not |
| | | | | | | measured |
| C15ORF40(+1) | A03.01 | KLFSCLSFLS | 1067 | 805.1 | 104.0 | not |
| | | | | | | measured |
| C15ORF40(+1) | A02.01 | AQAGVQWRSL | 1058 | 630.2 | 670.0 | not |
| | | | | | | measured |
| C15ORF40(+1) | A24.02 | RRMPPCLANF | 1073 | 253.0 | 141.1 | not |
| | | | | | | measured |
| C15ORF40(+1) | A03.01 | CLSFLSSWDY | 1060 | 890.5 | 2705.8 | not |
| | | | | | | measured |
| C15ORF40(+1) | A24.02 | GFKLFSCLSF | 1065 | 387.4 | 643.0 | not |
| | | | | | | measured |
| C15ORF40(+1) | A24.02 | RMPPCLANF | 1072 | 34.4 | 8.7 | not |
| | | | | | | measured |
| C15ORF40(+1) | A03.01 | CLANFCIFNR | 1059 | 575.4 | 221.8 | not |
| | | | | | | measured |
| C15ORF40(+1) | A01.01 | CLSFLSSWDY | 1060 | 538.7 | 987.3 | not |
| | | | | | | measured |
| CNOT1(+1) | A02.01 | SVCFFFFSV | 1078 | 27.0 | 175.0 | 9.4 |
| CNOT1(+1) | B08.01 | SVCFFFFSV | 1078 | 4940.0 | 10599.0 | 0 |
| CNOT1(+1) | A02.01 | MSVCFFFFSV | 1077 | 131.0 | 1706.4 | not |
| | | | | | | measured |
| CNOT1(+1) | A02.01 | FFFSVIFST | 1076 | 608.9 | 4556.0 | not |
| | | | | | | measured |
| CNOT1(−1) | A01.01 | MSVCFFFFCY | 1081 | 310.4 | 4369.3 | not |
| | | | | | | measured |
| CNOT1(−1) | A02.01 | SVCFFFFCYI | 1082 | 237.2 | 519.8 | not |
| | | | | | | measured |
| CNOT1(−1) | A24.02 | FFCYILNTMF | 1080 | 583.4 | 73.4 | not |
| | | | | | | measured |
| EGFR, T790M | A02.01 | MQLMPFGCLL | 947 | 21.0 | 20.0 | 0.4 |
| EGFR, T790M | A02.01 | MQLMPFGCL | 946 | 842.0 | 166.0 | 0.4 |
| EGFR, T790M | A02.01 | LIMQLMPFGC | 944 | 1984.0 | 177.0 | 0.4 |
| EGFR, T790M | A02.01 | QLIMQLMPF | 948 | 2511.0 | 227.0 | 0.3 |
| EGFR, T790M | B08.01 | QLIMQLMPF | 948 | 891.0 | 388.0 | 0 |
| EGFR, T790M | B08.01 | IMQLMPFGCL | 942 | 1302.0 | 548.0 | 0 |
| EGFR, T790M | A02.01 | CLTSTVQLIM | 940 | 3465.0 | 716.0 | 0 |
| EGFR, T790M | A02.01 | IMQLMPFGCL | 942 | 143.0 | 837.0 | 0.5 |
| EGFR, T790M | A02.01 | IMQLMPFGC | 941 | 1123.0 | 1607.0 | 0.4 |
| EGFR, T790M | B07.02 | MQLMPFGCL | 946 | 10169.0 | 2270.0 | 0 |
| EGFR, T790M | A24.02 | QLIMQLMPF | 948 | 3209.0 | 2389.0 | 0.4 |
| EGFR, T790M | A02.01 | LIMQLMPFG | 943 | 4961.0 | 3513.0 | 0 |
| EGFR, T790M | A24.02 | VQLIMQLMPF | 951 | 1455.0 | 4559.0 | 0 |
| EGFR, T790M | A02.01 | VQLIMQLMPF | 951 | 4464.0 | 5492.0 | 0 |
| EGFR, T790M | A02.01 | QLIMQLMPFG | 949 | 5751.0 | 5926.0 | 0 |
| EGFR, T790M | B08.01 | MQLMPFGCL | 946 | 1105.0 | 7045.0 | 0 |
| EGFR, T790M | A02.01 | STVQLIMQL | 950 | 2151.0 | 8537.0 | 0 |
| EGFR, T790M | A01.01 | CLTSTVQLIM | 940 | 2998.0 | 11036.0 | 0 |
| EGFR, T790M | B08.01 | MQLMPFGCLL | 947 | 970.0 | 14056.0 | 0 |
| EGFR, T790M | B08.01 | VQLIMQLMPF | 951 | 3370.0 | 17898.0 | 0 |
| EGFR, T790M | A24.02 | IMQLMPFGCL | 942 | 4394.0 | 18102.0 | 0 |
| EGFR, T790M | A24.02 | MQLMPFGCLL | 947 | 4168.0 | 23572.0 | 0 |
| EGFR, T790M | A01.01 | LTSTVQLIM | 945 | 1000.7 | 2891.1 | not |
| | | | | | | measured |
| EGFR:SEPT14 | B08.01 | QLQDKFEHL | 1696 | 917.0 | 989.0 | 0 |
| EGFR:SEPT14 | A02.01 | QLQDKFEHL | 1696 | 422.0 | 1155.0 | 0.6 |
| EGFR:SEPT14 | A02.01 | YLVIQLQDKF | 1698 | 9963.0 | 2057.0 | 0 |
| EGFR:SEPT14 | A24.02 | YLVIQLQDKF | 1698 | 9508.0 | 2152.0 | 2.6 |
| EGFR:SEPT14 | A02.01 | IQLQDKFEHL | 1695 | 820.0 | 4265.0 | 0.2 |
| EGFR:SEPT14 | B08.01 | IQLQDKFEHL | 1695 | 4278.0 | 10247.0 | 0 |
| EGFRvIII | A02.01 | ALEEKKGNYV | 1694 | 2445.0 | 141.0 | 0 |
| (internal | | | | | | |
| deletion) | | | | | | |
| EIF2B3(−1) | A02.01 | KQWSSVTSL | 1083 | 54.4 | 26.5 | not |
| | | | | | | measured |
| EML4:ALK | B08.01 | QVYRRKHQEL | 1699 | 194.0 | 160.0 | 0 |
| EPHB2(−1) | A02.01 | ILIRKAMTV | 1085 | 38.2 | 19.5 | not |
| | | | | | | measured |
| ESR1, D538G | A24.02 | PLYGLLLEML | 956 | 1519.0 | 444.0 | 6.3 |
| ESR1, D538G | A02.01 | GLLLEMLDA | 952 | 705.0 | 558.0 | 0.4 |
| ESR1, D538G | A02.01 | PLYGLLLEM | 955 | 349.0 | 640.0 | 0.7 |
| ESR1, D538G | A24.02 | VVPLYGLLL | 958 | 2965.0 | 658.0 | 0.8 |
| ESR1, D538G | A02.01 | PLYGLLLEML | 956 | 542.0 | 797.0 | 0 |
| ESR1, D538G | A02.01 | VVPLYGLLL | 958 | 4432.0 | 1039.0 | 0.6 |
| ESR1, D538G | A02.01 | NVVPLYGLL | 954 | 4835.0 | 10471.0 | 0 |
| ESR1, D538G | B07.02 | VPLYGLLLEM | 957 | 145.1 | 27.9 | not |
| | | | | | | measured |
| ESR1, D538G | A24.02 | LYGLLLEML | 953 | 218.3 | 0.8 | not |
| | | | | | | measured |
| ESR1, S463P | A02.01 | FLPSTLKSL | 959 | 71.0 | 21.0 | 2.1 |
| ESR1, S463P | A02.01 | GVYTFLPST | 960 | 307.0 | 779.0 | 1.3 |
| ESR1, S463P | A24.02 | FLPSTLKSL | 959 | 10723.0 | 995.0 | 1 |
| ESR1, S463P | A02.01 | GVYTFLPSTL | 961 | 248.0 | 1197.0 | 0.4 |
| ESR1, S463P | B08.01 | FLPSTLKSL | 959 | 2314.0 | 1968.0 | 0 |
| ESR1, S463P | A24.02 | GVYTFLPSTL | 961 | 954.0 | 7696.0 | 0 |
| ESR1, Y537C | A02.01 | PLCDLLLEM | 967 | 1067.0 | 602.0 | 0.8 |
| ESR1, Y537C | A02.01 | VVPLCDLLL | 970 | 5533.0 | 1200.0 | 0 |
| ESR1, Y537C | A02.01 | NVVPLCDLLL | 966 | 1964.0 | 1373.0 | 0 |
| ESR1, Y537C | A02.01 | PLCDLLLEML | 968 | 1320.0 | 2008.0 | 0.9 |
| ESR1, Y537C | A02.01 | NVVPLCDLL | 965 | 3473.0 | 3027.0 | 0 |
| ESR1, Y537C | A24.02 | VVPLCDLLL | 970 | 7992.0 | 3888.0 | 0.4 |
| ESR1, Y537N | A02.01 | PLNDLLLEM | 973 | 1062.0 | 151.0 | 4.2 |
| ESR1, Y537N | A02.01 | NVVPLNDLL | 971 | 4725.0 | 2900.0 | 0 |
| ESR1, Y537N | A02.01 | NVVPLNDLLL | 972 | 2606.0 | 4190.0 | 0 |
| ESR1, Y537N | A02.01 | PLNDLLLEML | 974 | 1741.0 | 11957.0 | 0 |
| ESR1, Y537S | A02.01 | PLSDLLLEM | 978 | 713.0 | 404.0 | 2.7 |
| ESR1, Y537S | A02.01 | NVVPLSDLLL | 977 | 2510.0 | 741.0 | 0 |
| ESR1, Y537S | A02.01 | NVVPLSDLL | 976 | 4259.0 | 916.0 | 0 |
| ESR1, Y537S | A02.01 | VVPLSDLLL | 981 | 8320.0 | 2551.0 | 0 |
| ESR1, Y537S | A02.01 | PLSDLLLEML | 979 | 1138.0 | 6469.0 | 0 |
| ESR1, Y537S | A24.02 | VVPLSDLLL | 981 | 8463.0 | 8252.0 | 0.5 |
| FAM111B(−1) | A03.01 | RMKVPLMK | 1086 | 58.9 | 33.0 | not |
| | | | | | | measured |
| FGFR3, S249C | A02.01 | YTLDVLERC | 983 | 3309.0 | 1764.0 | 6.6 |
| FGFR3, S249C | B08.01 | VLERCPHRPI | 982 | 3629.0 | 7223.0 | 0 |
| FGFR3, S249C | A02.01 | VLERCPHRPI | 982 | 4505.0 | 15321.0 | 0 |
| FGFR3:TACC3 | A02.01 | VLTVTSTDV | 1702 | 1255.0 | 295.0 | 1.1 |
| FRG1B, I10T | B07.02 | KLSDSRTAL | 1747 | 225.0 | 9.0 | 6.8 |
| FRG1B, I10T | A02.01 | KLSDSRTAL | 1747 | 275.0 | 111.0 | 2.8 |
| FRG1B, I10T | B08.01 | KLSDSRTAL | 1747 | 3276.0 | 122.0 | 0 |
| FRG1B, L52S | A02.01 | ALSASNSCFI | 1752 | 327.0 | 226.0 | 0.8 |
| FRG1B, L52S | B08.01 | FQNGKMALSA | 164 | 7796.0 | 425.0 | 0 |
| FRG1B, L52S | B07.02 | ALSASNSCF | 163 | 13989.0 | 684.0 | 0 |
| FRG1B, L52S | A02.01 | ALSASNSCF | 163 | 7913.0 | 728.0 | 0.3 |
| FRG1B, L52S | A02.01 | FQNGKMALS | 984 | 2305.0 | 3276.0 | 0 |
| FRG1B, L52S | A02.01 | FQNGKMALSA | 164 | 1205.0 | 6158.0 | 0 |
| FRG1B, L52S | A24.02 | ALSASNSCF | 163 | 9672.0 | 16338.0 | 0.2 |
| GATA3 | B08.01 | FLKAESKIM | 535 | 263.4 | 21.9 | not |
| ...CSNH (SEQ | | | | | | measured |
| ID NO: 1819) | | | | | | |
| GATA3 | B08.01 | LQHGHRHGL | 559 | 693.0 | 550.4 | not |
| ...CSNH (SEQ | | | | | | measured |
| ID NO: 1819) | | | | | | |
| GATA3 | B07.02 | EPHLALQPL | 529 | 106.6 | 17.0 | not |
| ...CSNH (SEQ | | | | | | measured |
| ID NO: 1819) | | | | | | |
| GATA3 | B07.02 | RPLQTHVLPE | 1429 | 968.0 | 2534.4 | not |
| ...CSNH (SEQ | | | | | | measured |
| ID NO: 1819) | | | | | | |
| GATA3 | B08.01 | FATLQRSSL | 531 | 138.0 | 26.6 | not |
| ...CSNH (SEQ | | | | | | measured |
| ID NO: 1819) | | | | | | |
| GATA3 | B07.02 | MFATLQRSSL | 567 | 1285.0 | 266.9 | not |
| ...CSNH (SEQ | | | | | | measured |
| ID NO: 1819) | | | | | | |
| GATA3 | A24.02 | MFLKAESKI | 568 | 1065.7 | 332.1 | not |
| ...CSNH (SEQ | | | | | | measured |
| ID NO: 1819) | | | | | | |
| GATA3 | B07.02 | FATLQRSSL | 531 | 261.9 | 14.0 | not |
| ...CSNH (SEQ | | | | | | measured |
| ID NO: 1819) | | | | | | |
| GATA3 | A02.01 | MLTGPPARV | 572 | 145.4 | 10.6 | not |
| ...CSNH (SEQ | | | | | | measured |
| ID NO: 1819) | | | | | | |
| GATA3 | B08.01 | EPHLALQPL | 529 | 1128.3 | 12.4 | not |
| ...CSNH (SEQ | | | | | | measured |
| ID NO: 1819) | | | | | | |
| GATA3 | B07.02 | GPPARVPAV | 537 | 297.6 | 221.2 | not |
| ...CSNH (SEQ | | | | | | measured |
| ID NO: 1819) | | | | | | |
| GATA3 | B08.01 | MFATLQRSSL | 567 | 220.5 | 53.4 | not |
| ...CSNH (SEQ | | | | | | measured |
| ID NO: 1819) | | | | | | |
| GATA3 | A02.01 | ALQPLQPHA | 520 | 644.4 | 603.9 | not |
| ...CSNH (SEQ | | | | | | measured |
| ID NO: 1819) | | | | | | |
| GATA3 | A03.01 | VLWTTPPLQH | 1430 | 962.3 | 16.0 | not |
| ...CSNH (SEQ | | | | | | measured |
| ID NO: 1819) | | | | | | |
| GATA3 | A02.01 | VLPEPHLAL | 594 | 140.7 | 16.0 | not |
| ...CSNH (SEQ | | | | | | measured |
| ID NO: 1819) | | | | | | |
| GATA3 | B07.02 | HVLPEPHLAL | 1428 | 1057.2 | 1332.6 | not |
| ...CSNH (SEQ | | | | | | measured |
| ID NO: 1819) | | | | | | |
| GATA3 | A03.01 | YMFLKAESK | 597 | 53.1 | 79.8 | not |
| ...CSNH (SEQ | | | | | | measured |
| ID NO: 1819) | | | | | | |
| GATA3 | B07.02 | VPAVPFDLHF | 595 | 1996.2 | 2114.2 | not |
| ...CSNH (SEQ | | | | | | measured |
| ID NO: 1819) | | | | | | |
| GATA3 | A02.01 | AIQPVLWTT | 519 | 229.3 | 8.1 | not |
| ...CSNH (SEQ | | | | | | measured |
| ID NO: 1819) | | | | | | |
| GATA3 | A02.01 | TLQRSSLWCL | 592 | 319.2 | 117.7 | not |
| ...CSNH (SEQ | | | | | | measured |
| ID NO: 1819) | | | | | | |
| GATA3 | A03.01 | KIMFATLQR | 552 | 62.5 | 2.5 | not |
| ...CSNH (SEQ | | | | | | measured |
| ID NO: 1819) | | | | | | |
| GATA3 | B07.02 | QPVLWTTPPL | 580 | 54.4 | 109.3 | not |
| ...CSNH (SEQ | | | | | | measured |
| ID NO: 1819) | | | | | | |
| GATA3 | B08.01 | ESKIMFATL | 530 | 253.7 | 17.7 | not |
| ...CSNH (SEQ | | | | | | measured |
| ID NO: 1819) | | | | | | |
| GATA3 | B08.01 | IMKPKRDGYM | 550 | 342.1 | 33.2 | not |
| ...CSNH (SEQ | | | | | | measured |
| ID NO: 1819) | | | | | | |
| GATA3 | B07.02 | KPKRDGYMF | 553 | 109.7 | 28.2 | not |
| ...CSNH (SEQ | | | | | | measured |
| ID NO: 1819) | | | | | | |
| GATA3 | B08.01 | FLKAESKIMF | 536 | 1539.9 | 82.3 | not |
| ...CSNH (SEQ | | | | | | measured |
| ID NO: 1819) | | | | | | |
| GATA3 | B07.02 | KPKRDGYMFL | 554 | 32.5 | 98.1 | not |
| ...CSNH (SEQ | | | | | | measured |
| ID NO: 1819) | | | | | | |
| GATA3 | B08.01 | LHFCRSSIM | 556 | 2141.2 | 118.7 | not |
| ...CSNH (SEQ | | | | | | measured |
| ID NO: 1819) | | | | | | |
| GATA3 CSNH | A02.01 | SMLTGPPARV | 141 | 57.0 | 15.0 | 21.7 |
| (SEQ ID NO: | | | | | | |
| 1819) | | | | | | |
| GATA3 CSNH | B08.01 | YMFLKAESKI | 598 | 606.0 | 32.0 | 0.4 |
| (SEQ ID NO: | | | | | | |
| 1819) | | | | | | |
| GATA3 CSNH | A02.01 | YMFLKAESKI | 598 | 163.0 | 166.0 | 0.6 |
| (SEQ ID NO: | | | | | | |
| 1819) | | | | | | |
| GATA3 CSNH | A03.01 | YMFLKAESKI | 598 | 1338.0 | 21111.0 | 0 |
| (SEQ ID NO: | | | | | | |
| 1819) | | | | | | |
| GATA3 YHEA | A02.01 | FLQEQYHEA | 1433 | 7.0 | 11.0 | 9.5 |
| (SEQ ID NO: | | | | | | |
| 1820) | | | | | | |
| GATA3 YHEA | B08.01 | FLQEQYHEA | 1433 | 1222.0 | 2285.0 | 0 |
| (SEQ ID NO: | | | | | | |
| 1820) | | | | | | |
| GBP3(−1) | B08.01 | TLKKKPRDI | 1087 | 286.3 | 3.3 | not |
| | | | | | | measured |
| HER2, | A02.01 | VMAYVMAGV | 1811 | 6.0 | 2.0 | 16.5 |
| G776insYVMA | | | | | | |
| (SEQ ID NO: | | | | | | |
| 1821) | | | | | | |
| HER2, | A02.01 | YVMAYVMAGV | 1813 | 5.0 | 57.0 | 20.9 |
| G776insYVMA | | | | | | |
| (SEQ ID NO: | | | | | | |
| 1821) | | | | | | |
| HER2, | B07.02 | YVMAYVMAG | 1812 | 6910.0 | 170.0 | 0 |
| G776insYVMA | | | | | | |
| (SEQ ID NO: | | | | | | |
| 1821) | | | | | | |
| HER2, | B08.01 | YVMAYVMAGV | 1813 | 721.0 | 353.0 | 0 |
| G776insYVMA | | | | | | |
| (SEQ ID NO: | | | | | | |
| 1821) | | | | | | |
| HER2, | A02.01 | YVMAYVMAG | 1812 | 841.0 | 11535.0 | 2.5 |
| G776insYVMA | | | | | | |
| (SEQ ID NO: | | | | | | |
| 1821) | | | | | | |
| HER2, | B08.01 | YVMAYVMAG | 1812 | 836.0 | 19413.0 | 1.2 |
| G776insYVMA | | | | | | |
| (SEQ ID NO: | | | | | | |
| 1821) | | | | | | |
| HER2, | B07.02 | YVMAYVMAGV | 1813 | 11445.0 | 52630.0 | 0 |
| G776insYVMA | | | | | | |
| (SEQ ID NO: | | | | | | |
| 1821) | | | | | | |
| HER2, L755S | A03.01 | KVSRENTSPK | 1753 | 66.0 | 7.0 | 13.5 |
| HER2, V777L | A02.01 | VMAGLGSPYV | 985 | 20.0 | 102.0 | 2.9 |
| HER2, V777L | A03.01 | VMAGLGSPYV | 985 | 3951.0 | 11222.0 | 0 |
| JAK1(−1) | A02.01 | SLMPAHWSI | 1831 | 4.0 | 48.0 | 5 |
| JAK1(−1) | A02.01 | LSLMPAHWSI | 1832 | 21.0 | 164.0 | 0.4 |
| JAK1(−1) | B08.01 | SLMPAHWSI | 1831 | 282.0 | 177.0 | 0 |
| JAK1(−1) | A02.01 | FQMQPLSLM | 1833 | 33.0 | 553.0 | 0.3 |
| JAK1(−1) | A24.02 | SLMPAHWSI | 1831 | 194.0 | 633.0 | 0.4 |
| JAK1(−1) | B08.01 | LSLMPAHWSI | 1832 | 1914.0 | 860.0 | 0 |
| JAK1(−1) | B07.02 | SLMPAHWSI | 1831 | 3907.0 | 1040.0 | 0 |
| JAK1(−1) | B08.01 | FQMQPLSLM | 1833 | 2261.0 | 6714.0 | 0 |
| JAK1(−1) | B07.02 | FQMQPLSLM | 1833 | 3458.0 | 10207.0 | 0 |
| JAK1(−1) | A24.02 | LSLMPAHWSI | 1832 | 2125.0 | 12398.0 | 0 |
| JAK1(−1) | A24.02 | FQMQPLSLM | 1833 | 4021.0 | 14612.0 | 0 |
| KIT, T670I | A02.01 | VIIEYCCYG | 992 | 4225.0 | 191.0 | 0.5 |
| KIT, T670I | A02.01 | IIEYCCYGDL | 990 | 3918.0 | 7310.0 | 0 |
| KIT, T670I | A02.01 | TIGGPTLVII | 991 | 5425.0 | 10685.0 | 0 |
| KIT, V654A | A02.01 | YLGNHMNIA | 996 | 92.0 | 117.0 | 0.6 |
| KIT, V654A | A02.01 | MNIANLLGA | 995 | 4522.0 | 128.0 | 0.3 |
| KIT, V654A | A02.01 | HMNIANLLGA | 993 | 294.0 | 430.0 | 0 |
| KIT, V654A | B08.01 | YLGNHMNIA | 996 | 2480.0 | 872.0 | 0 |
| KIT, V654A | A02.01 | YLGNHMNIAN | 997 | 7103.0 | 1342.0 | 0 |
| KIT, V654A | A02.01 | IANLLGACTI | 994 | 11214.0 | 6417.0 | 0 |
| KRAS, G12C | A02.01 | KLVVVGACGV | 143 | 204.0 | 150.0 | 1 |
| KRAS, G12C | A02.01 | LVVVGACGV | 1754 | 658.0 | 1213.0 | 0.6 |
| KRAS, G12C | A03.01 | VVVGACGVGK | 1756 | 300.7 | 1.6 | not |
| | | | | | | measured |
| KRAS, G12C | A03.01 | VVGACGVGK | 1755 | 182.0 | 4.1 | not |
| | | | | | | measured |
| KRAS, G12D | A02.01 | KLVVVGADGV | 1759 | 361.0 | 184.0 | 0.9 |
| KRAS, G12D | A02.01 | LVVVGADGV | 1760 | 2120.0 | 1192.0 | 0 |
| KRAS, G12V | A02.01 | KLVVVGAVGV | 1761 | 163.0 | 96.0 | 0.9 |
| KRAS, G12V | A02.01 | LVVVGAVGV | 1762 | 453.0 | 975.0 | 0.6 |
| KRAS, G12V | A03.01 | VVGAVGVGK | 1763 | 168.9 | 1.9 | not |
| | | | | | | measured |
| KRAS, Q61H | A01.01 | ILDTAGHEEY | 1765 | 131.8 | 64.2 | not |
| | | | | | | measured |
| KRAS, Q61L | A01.01 | ILDTAGLEEY | 1766 | 65.9 | 8.6 | not |
| | | | | | | measured |
| KRAS, Q61L | A02.01 | LLDILDTAGL | 1767 | 113.4 | 715.7 | not |
| | | | | | | measured |
| LMAN1(+1) | B07.02 | GPPRPPRAAC | 1095 | 69.3 | 48.6 | not |
| | | | | | | measured |
| LMAN1(+1) | B07.02 | PPRPPRAAC | 1096 | 263.7 | 32.8 | not |
| | | | | | | measured |
| LMAN1(−1) | B08.01 | SLRRKYLRV | 1097 | 28.0 | 0.4 | not |
| | | | | | | measured |
| MEK, C121S | A02.01 | VLHESNSPYI | 999 | 189.0 | 131.0 | 1.9 |
| MEK, P124L | A02.01 | VLHECNSLYI | 1007 | 67.0 | 10.0 | 5.1 |
| MEK, P124L | A02.01 | SLYIVGFYGA | 1005 | 104.0 | 390.0 | 0.4 |
| MEK, P124L | A02.01 | SLYIVGFYG | 1004 | 2987.0 | 1063.0 | 0 |
| MEK, P124L | A02.01 | LQVLHECNSL | 1000 | 5803.0 | 4723.0 | 0 |
| MEK, P124L | A02.01 | QVLHECNSL | 1003 | 8695.0 | 7774.0 | 0.5 |
| MEK, P124L | A03.01 | VLHECNSLYI | 1007 | 4733.0 | 10500.0 | 0 |
| MEK, P124L | B08.01 | QVLHECNSL | 1003 | 6854.0 | 14532.0 | 0 |
| MEK, P124L | B08.01 | LQVLHECNSL | 1000 | 2782.0 | 19316.0 | 0 |
| MLL2, ...LSPH | A02.01 | LLQVTQTSFA | 1792 | 1935.0 | 676.9 | not |
| (SEQ ID NO: | | | | | | measured |
| 1822) | | | | | | |
| MLL2, ...LSPH | A02.01 | RLWHLLLQV | 1794 | 8.3 | 1.3 | not |
| (SEQ ID NO: | | | | | | measured |
| 1822) | | | | | | |
| MLL2, ...LSPH | A02.01 | LQVTQTSFAL | 1793 | 1147.4 | 718.3 | not |
| (SEQ ID NO: | | | | | | measured |
| 1822) | | | | | | |
| MLL2, ...LSPH | A02.01 | RLWHLLLQVT | 1795 | 140.8 | 50.9 | not |
| (SEQ ID NO: | | | | | | measured |
| 1822) | | | | | | |
| MLL2, ...LSPH | A02.01 | ALAPTLTHM | 1790 | 98.4 | 59.0 | not |
| (SEQ ID NO: | | | | | | measured |
| 1822) | | | | | | |
| MLL2, ...LSPH | A02.01 | ALAPTLTHML | 1791 | 66.4 | 39.0 | not |
| (SEQ ID NO: | | | | | | measured |
| 1822) | | | | | | |
| MLL2, CRLS | B08.01 | SLGNHLCPL | 745 | 136.0 | 6.0 | 0.5 |
| (SEQ ID NO: | | | | | | |
| 1823) | | | | | | |
| MLL2, CRLS | A02.01 | SLGNHLCPL | 745 | 28.0 | 18.0 | 3.5 |
| (SEQ ID NO: | | | | | | |
| 1823) | | | | | | |
| MLL2, CRLS | B07.02 | SLGNHLCPL | 745 | 3967.0 | 2590.0 | 0 |
| (SEQ ID NO: | | | | | | |
| 1823) | | | | | | |
| MSH3(−1) | A02.01 | LLALWECSL | 1107 | 46.0 | 15.0 | 4 |
| MSH3(−1) | A02.01 | FLLALWECSL | 1103 | 17.0 | 114.0 | 10.8 |
| MSH3(−1) | B08.01 | LLALWECSL | 1107 | 1454.0 | 154.0 | 0 |
| MSH3(−1) | B08.01 | FLLALWECSL | 1103 | 671.0 | 13100.0 | 0 |
| MSH3(−1) | A02.01 | LIVSRTLLL | 1105 | 755.0 | 173.5 | not |
| | | | | | | measured |
| MSH3(−1) | A02.01 | LIVSRTLLLV | 1106 | 146.6 | 10920.6 | not |
| | | | | | | measured |
| MSH3(−1) | B08.01 | LIVSRTLLL | 1105 | 270.7 | 881.7 | not |
| | | | | | | measured |
| MSH3(−1) | A02.01 | IVSRTLLLV | 1104 | 166.2 | 12.7 | not |
| | | | | | | measured |
| MSH3(−1) | B08.01 | SLPQARLCLI | 1111 | 632.3 | 4313.9 | not |
| | | | | | | measured |
| MSH3(−1) | B08.01 | CLIVSRTLLL | 1101 | 835.7 | 1100.4 | not |
| | | | | | | measured |
| MSH3(−1) | B08.01 | LPQARLCLI | 1108 | 136.5 | 15.0 | not |
| | | | | | | measured |
| MSH3(−1) | A02.01 | SLPQARLCLI | 1111 | 782.4 | 112.9 | not |
| | | | | | | measured |
| MSH3(−1) | A02.01 | CLIVSRTLLL | 1101 | 560.5 | 2005.1 | not |
| | | | | | | measured |
| MSH3(−1) | A02.01 | FLLALWECS | 1102 | 686.6 | 93.2 | not |
| | | | | | | measured |
| MSH3(−1) | A02.01 | FLLALWECSL | 1103 | 16.6 | 0.9 | not |
| | | | | | | measured |
| MSH3(−1) | A02.01 | LLALWECSL | 1107 | 46.1 | 12.5 | not |
| | | | | | | measured |
| MSH3(−1) | B07.02 | LPQARLCLI | 1108 | 134.6 | 72.6 | not |
| | | | | | | measured |
| MSH3(−1) | B08.01 | CLIVSRTLL | 1100 | 915.0 | 126.7 | not |
| | | | | | | measured |
| MSH3(−1) | A02.01 | ALWECSLPQA | 1099 | 24.6 | 9.0 | not |
| | | | | | | measured |
| MSH3(−1) | B08.01 | LPQARLCLIV | 1109 | 591.4 | 152.1 | not |
| | | | | | | measured |
| MSH6(+1) | A02.01 | LLPEDTPPL | 1777 | 8.9 | 2.8 | not |
| | | | | | | measured |
| MSH6(+1) | A02.01 | ILLPEDTPPL | 1776 | 16.3 | 6.7 | not |
| | | | | | | measured |
| MYC, E39D | A02.01 | QQSDLQPPA | 1010 | 4930.0 | 70.0 | 0 |
| MYC, E39D | A02.01 | QQQSDLQPPA | 1009 | 11835.0 | 646.0 | 0 |
| MYC, E39D | A02.01 | YQQQQQSDL | 1011 | 8842.0 | 799.0 | 0.4 |
| MYC, E39D | B08.01 | YQQQQQSDL | 1011 | 5259.0 | 18868.0 | 0 |
| MYC, P57S | A02.01 | FELLSTPPL | 1012 | 2509.0 | 225.0 | 0 |
| MYC, P57S | A02.01 | LLSTPPLSPS | 1013 | 5226.0 | 1770.0 | 0 |
| MYC, P57S | B08.01 | FELLSTPPL | 1012 | 4208.0 | 3179.0 | 0 |
| MYC, T58I | A02.01 | LLPIPPLSPS | 1016 | 2071.0 | 449.0 | 0 |
| MYC, T58I | A02.01 | FELLPIPPL | 1014 | 2472.0 | 553.0 | 0 |
| NAB:STAT6 | A02.01 | SQIMSLWGL | 1708 | 14.0 | 62.0 | 1 |
| (“variant 1” of | | | | | | |
| Chmielecki et | | | | | | |
| al.) | | | | | | |
| NAB:STAT6 | A02.01 | IMSLWGLVS | 1704 | 3630.0 | 7321.0 | 0 |
| (“variant 1” of | | | | | | |
| Chmielecki et | | | | | | |
| al.) | | | | | | |
| NAB:STAT6 | A24.02 | SQIMSLWGL | 1708 | 1604.0 | 8516.0 | 0 |
| (“variant 1” of | | | | | | |
| Chmielecki et | | | | | | |
| al.) | | | | | | |
| NAB:STAT6 | B08.01 | SQIMSLWGL | 1708 | 4587.0 | 15997.0 | 0 |
| (“variant 1” of | | | | | | |
| Chmielecki et | | | | | | |
| al.) | | | | | | |
| NDRG1:ERG | A02.01 | LLQEFDVQEA | 1711 | 200.0 | 45.0 | 2.5 |
| NDRG1:ERG | A02.01 | LQEFDVQEAL | 1712 | 2229.0 | 50280.0 | 0 |
| NDUFC2(- | A02.01 | ITAFFFCWI | 1114 | 437.7 | 7490.4 | not |
| KCDT14)(+1) | | | | | | measured |
| NDUFC2(- | A24.02 | LYITAFFFCW | 1115 | 46.6 | 45.3 | not |
| KCDT14)(+1) | | | | | | measured |
| NDUFC2(- | A03.01 | FFFCWILSCK | 1113 | 325.9 | 597.1 | not |
| KCDT14)(+1) | | | | | | measured |
| NDUFC2(- | A03.01 | FFCWILSCK | 1112 | 985.7 | 184.9 | not |
| KCDT14)(+1) | | | | | | measured |
| NDUFC2(- | A02.01 | LLYITAFFL | 1118 | 24.0 | 713.0 | 17 |
| KCDT14)(−1) | | | | | | |
| NDUFC2(- | B08.01 | LLYITAFFL | 1118 | 3588.0 | 9592.0 | 0 |
| KCDT14)(−1) | | | | | | |
| NDUFC2(- | A02.01 | ITAFFLLDI | 1117 | 699.0 | 78.7 | not |
| KCDT14)(−1) | | | | | | measured |
| NDUFC2(- | A02.01 | YITAFFLLDI | 1122 | 157.0 | 64.5 | not |
| KCDT14)(−1) | | | | | | measured |
| NDUFC2(- | A24.02 | LYITAFFLL | 1120 | 15.6 | 0.1 | not |
| KCDT14)(−1) | | | | | | measured |
| NDUFC2(- | A02.01 | LLYITAFFLL | 1119 | 43.7 | 323.2 | not |
| KCDT14)(−1) | | | | | | measured |
| NDUFC2(- | A24.02 | LLYITAFFLL | 1119 | 59.7 | 60.1 | not |
| KCDT14)(−1) | | | | | | measured |
| NDUFC2(- | A24.02 | LYITAFFLLD | 1121 | 414.3 | 0.4 | not |
| KCDT14)(−1) | | | | | | measured |
| NRAS, Q61K | A01.01 | ILDTAGKEEY | 1768 | 272.6 | 14.3 | not |
| | | | | | | measured |
| NRAS, Q61R | A01.01 | ILDTAGREEY | 1769 | 255.8 | 7.0 | not |
| | | | | | | measured |
| PDGFRa, T674I | A02.01 | IIIEYCFYG | 1019 | 693.0 | 16.0 | 1.2 |
| PDGFRa, T674I | A02.01 | YIIIEYCFYG | 1022 | 1529.0 | 113.0 | 0 |
| PDGFRa, T674I | A02.01 | IIEYCFYGDL | 1018 | 3049.0 | 1090.0 | 0 |
| PIK3CA, E542K | A02.01 | KITEQEKDFL | 1023 | 12548.0 | 1397.0 | 0 |
| PIK3CA, E542K | A03.01 | AISTRDPLSK | 180 | 41.3 | 57.5 | not |
| | | | | | | measured |
| PTEN, R130Q | A02.01 | QTGVMICAYL | 1027 | 3786.0 | 9760.0 | 0 |
| RAC1, P29S | A02.01 | FSGEYIPTV | 202 | 21.0 | 3.0 | 6.8 |
| RAC1, P29S | A02.01 | AFSGEYIPTV | 1028 | 1008.0 | 781.0 | 0 |
| RAC1, P29S | A01.01 | TTNAFSGEY | 201 | 23.0 | 4.4 | not |
| | | | | | | measured |
| RAC1, P29S | A01.01 | YTTNAFSGEY | 204 | 20.0 | 10.5 | not |
| | | | | | | measured |
| RBM27(+1) | B07.02 | MPKDVNIQV | 1124 | 291.6 | 12.5 | not |
| | | | | | | measured |
| RBM27(+1) | A01.01 | TGSNEVTTRY | 1125 | 343.9 | 15545.2 | not |
| | | | | | | measured |
| RBM27(+1) | A01.01 | GSNEVTTRY | 1123 | 151.6 | 605.5 | not |
| | | | | | | measured |
| RNF43, RHTP | A02.01 | TQLARFFPI | 1808 | 17.0 | 19.0 | 0 |
| (SEQ ID NO: | | | | | | |
| 1824) | | | | | | |
| RNF43, RHTP | A24.02 | TQLARFFPI | 1808 | 268.0 | 52.0 | 0 |
| (SEQ ID NO: | | | | | | |
| 1824) | | | | | | |
| RNF43, RHTP | B08.01 | TQLARFFPI | 1808 | 41.0 | 9150.0 | 0 |
| (SEQ ID NO: | | | | | | |
| 1824) | | | | | | |
| SEC31A(−1) | A02.01 | KLMLLRLNL | 1127 | 58.0 | 17.0 | 16.9 |
| SEC31A(−1) | B08.01 | KLMLLRLNL | 1127 | 421.0 | 29.0 | 0 |
| SEC31A(−1) | B07.02 | KLMLLRLNL | 1127 | 2969.0 | 133.0 | 1.5 |
| SEC31A(−1) | A03.01 | KLMLLRLNL | 1127 | 4664.0 | 210.0 | 0 |
| SEC31A(−1) | B08.01 | LLRLNLRKM | 1129 | 185.1 | 68.2 | not |
| | | | | | | measured |
| SEC31A(−1) | A03.01 | MLLRLNLRKM | 1134 | 171.4 | 116.9 | not |
| | | | | | | measured |
| SEC31A(−1) | A03.01 | KLMLLRLNLR | 1128 | 95.4 | 48.4 | not |
| | | | | | | measured |
| SEC31A(−1) | A03.01 | MLLRLNLRK | 1133 | 14.6 | 1.3 | not |
| | | | | | | measured |
| SEC31A(−1) | A03.01 | LMLLRLNLRK | 1131 | 23.9 | 6.0 | not |
| | | | | | | measured |
| SEC31A(−1) | A02.01 | MLLRLNLRKM | 1134 | 508.5 | 2507.4 | not |
| | | | | | | measured |
| SEC31A(−1) | B08.01 | MLLRLNLRKM | 1134 | 565.9 | 95.3 | not |
| | | | | | | measured |
| SEC31A(−1) | A02.01 | KLMLLRLNL | 1127 | 57.6 | 2.6 | not |
| | | | | | | measured |
| SEC31A(−1) | B08.01 | LMLLRLNL | 1130 | 116.0 | 9.3 | not |
| | | | | | | measured |
| SEC31A(−1) | B08.01 | KLMLLRLNL | 1127 | 420.6 | 58.4 | not |
| | | | | | | measured |
| SEC31A(−1) | A02.01 | KKLMLLRLNL | 1126 | 275.4 | 288.9 | not |
| | | | | | | measured |
| SEC31A(−1) | B08.01 | NLRKMCGPF | 1135 | 163.5 | 35.9 | not |
| | | | | | | measured |
| SEC31A(−1) | B08.01 | YCQKKLMLL | 1137 | 203.1 | 222.1 | not |
| | | | | | | measured |
| SEC31A(−1) | B08.01 | LNLRKMCGPF | 1132 | 782.2 | 438.7 | not |
| | | | | | | measured |
| SEC63 (+1) | A03.01 | YTCAITTVK | 1146 | 279.0 | 122.4 | not |
| | | | | | | measured |
| SEC63 (+1) | A03.01 | TYTCAITTVK | 1145 | 556.4 | 2362.2 | not |
| | | | | | | measured |
| SEC63(+1) | A03.01 | ITTVKATETK | 1139 | 795.8 | 1245.3 | not |
| | | | | | | measured |
| SEC63(+1) | A03.01 | KSKKKETFKK | 1141 | 744.0 | 39.6 | not |
| | | | | | | measured |
| SEC63(+1) | B08.01 | TFKKKTYTC | 1143 | 648.2 | 77.9 | not |
| | | | | | | measured |
| SEC63(+1) | A03.01 | KSKKKETFK | 1140 | 411.0 | 74.3 | not |
| | | | | | | measured |
| SEC63(+1) | B08.01 | FKKKTYTCAI | 1138 | 562.8 | 384.9 | not |
| | | | | | | measured |
| SEC63(−1) | B08.01 | TAKSKKRNL | 1147 | 213.8 | 30.6 | not |
| | | | | | | measured |
| SF3B1, K700E | A02.01 | GLVDEQQEV | 1770 | 50.0 | 44.0 | 7.4 |
| SLC35F5(−1) | A02.01 | FALCGFWQI | 1148 | 10.5 | 0.4 | not |
| | | | | | | measured |
| SMAP1(−1) | A03.01 | KSRQNHLQLK | 286 | 88.1 | 4.7 | not |
| | | | | | | measured |
| SMAP1(−1) | B07.02 | KSRQNHLQL | 275 | 329.5 | 78.0 | not |
| | | | | | | measured |
| SMAP1(−1) | A24.02 | KLRSPLWIF | 270 | 504.5 | 828.2 | not |
| | | | | | | measured |
| SMAP1(−1) | A03.01 | KISNWSLKK | 268 | 11.5 | 8.8 | not |
| | | | | | | measured |
| SMAP1(−1) | A11.01 | KISNWSLKK | 268 | 15.3 | 9.8 | not |
| | | | | | | measured |
| SMAP1(−1) | A11.01 | SLKKVPALK | 269 | 117.6 | 129.1 | not |
| | | | | | | measured |
| SMAP1(−1) | B08.01 | SLKKVPAL | 1150 | 66.8 | 7.9 | not |
| | | | | | | measured |
| SMAP1(−1) | A03.01 | WSLKKVPALK | 288 | 148.9 | 94.9 | not |
| | | | | | | measured |
| SMAP1(−1) | A03.01 | KISNWSLKKV | 285 | 168.3 | 114.6 | not |
| | | | | | | measured |
| SMAP1(−1) | A03.01 | RKISNWSLKK | 1151 | 20.8 | 130.6 | not |
| | | | | | | measured |
| SMAP1(−1) | A03.01 | SLKKVPALK | 269 | 29.6 | 4.4 | not |
| | | | | | | measured |
| SMAP1(−1) | B08.01 | SQKSRQNHL | 274 | 305.0 | 44.6 | not |
| | | | | | | measured |
| SMAP1(−1) | B07.02 | ALKKLRSPL | 267 | 355.5 | 223.2 | not |
| | | | | | | measured |
| SMAP1(−1) | B08.01 | ALKKLRSPL | 267 | 58.9 | 0.5 | not |
| | | | | | | measured |
| SMAP1(−1) | B08.01 | WSLKKVPAL | 280 | 110.7 | 12.5 | not |
| | | | | | | measured |
| SMAP1(−1) | A03.01 | HLQLKSCRRK | 291 | 216.7 | 96.9 | not |
| | | | | | | measured |
| SMAP1(−1) | B08.01 | LKKLRSPL | 1149 | 139.6 | 0.6 | not |
| | | | | | | measured |
| SMAP1(−1) | A03.01 | SLKKVPALKK | 287 | 43.1 | 9.6 | not |
| | | | | | | measured |
| SPOP, F133L | A02.01 | FVQGKDWGL | 1771 | 121.0 | 34.0 | 2.1 |
| SPOP, F133L | B08.01 | FVQGKDWGL | 1771 | 1401.0 | 207.0 | 0 |
| TFAM(+1) | A03.01 | RVNTAWKTK | 1155 | 136.4 | 8.6 | not |
| | | | | | | measured |
| TFAM(+1) | A03.01 | RVNTAWKTKK | 1156 | 70.6 | 2.3 | not |
| | | | | | | measured |
| TFAM(+1) | B08.01 | TKKKRVNTA | 1157 | 312.4 | 159.4 | not |
| | | | | | | measured |
| TFAM(+1) | A03.01 | KRVNTAWKTK | 1153 | 304.1 | 331.6 | not |
| | | | | | | measured |
| TFAM(+1) | B08.01 | WKTKKTSFSL | 1158 | 930.6 | 112.2 | not |
| | | | | | | measured |
| TFAM(+1) | B08.01 | MTKKKRVNTA | 1154 | 534.2 | 186.9 | not |
| | | | | | | measured |
| TGFBR2(−1) | A02.01 | RLSSCVPVA | 1168 | 83.0 | 4.0 | 18.7 |
| TGFBR2(−1) | A03.01 | RLSSCVPVA | 1168 | 4264.0 | 439.0 | 0 |
| TGFBR2(−1) | A03.01 | AMTTSSSQK | 1160 | 48.5 | 8.3 | not |
| | | | | | | measured |
| TGFBR2(−1) | A03.01 | AMTTSSSQKN | 1161 | 887.2 | 2336.5 | not |
| | | | | | | measured |
| TGFBR2(−1) | B08.01 | IMKEKKSL | 1164 | 69.8 | 14.1 | not |
| | | | | | | measured |
| TGFBR2(−1) | A02.01 | KSLVRLSSCV | 1166 | 903.1 | 279.8 | not |
| | | | | | | measured |
| TGFBR2(−1) | A02.01 | SLVRLSSCV | 1171 | 177.3 | 29.9 | not |
| | | | | | | measured |
| TGFBR2(−1) | A11.01 | SAMTTSSSQK | 1170 | 36.4 | 15.8 | not |
| | | | | | | measured |
| TGFBR2(−1) | B08.01 | IMKEKKSLV | 1165 | 80.8 | 16.8 | not |
| | | | | | | measured |
| TGFBR2(−1) | A11.01 | AMTTSSSQK | 1160 | 89.9 | 161.6 | not |
| | | | | | | measured |
| TGFBR2(−1) | A03.01 | SAMTTSSSQK | 1170 | 96.7 | 15.7 | not |
| | | | | | | measured |
| TGFBR2(−1) | A02.01 | RLSSCVPVAL | 1169 | 84.5 | 54.2 | not |
| | | | | | | measured |
| TGFBR2(−1) | A02.01 | VRLSSCVPVA | 1173 | 640.6 | 1206.8 | not |
| | | | | | | measured |
| TGFBR2(−1) | A02.01 | RLSSCVPVA | 1168 | 82.7 | 49.5 | not |
| | | | | | | measured |
| TGFBR2(−1) | B08.01 | CIMKEKKSL | 1162 | 218.5 | 7.5 | not |
| | | | | | | measured |
| TGFBR2(−1) | A02.01 | ALMSAMTTS | 1159 | 320.4 | 139.1 | not |
| | | | | | | measured |
| TGFBR2(−1) | A02.01 | LVRLSSCVPV | 1167 | 132.7 | 1237.6 | not |
| | | | | | | measured |
| THAP5(−1) | A03.01 | KMRKKYAQK | 1174 | 23.7 | 5.7 | not |
| | | | | | | measured |
| TMPRSS2:ERG | A02.01 | ALNSEALSV | 140 | 66.0 | 14.0 | 9.1 |
| TMPRSS2:ERG | A02.01 | ALNSEALSVV | 1715 | 84.0 | 15.0 | 2.9 |
| TMPRSS2:ERG | A02.01 | MALNSEALSV | 1716 | 198.0 | 129.0 | 0.7 |
| TMPRSS2:ERG | B08.01 | MALNSEALSV | 1716 | 8512.0 | 13457.0 | 0 |
| TP53, AAVG | A02.01 | GLLAFWDSQV | 1538 | 57.0 | 10.0 | 14.2 |
| (SEQ ID NO: | | | | | | |
| 1825) | | | | | | |
| TP53, AAVG | A02.01 | LLAFWDSQV | 1540 | 13.0 | 68.0 | 12.8 |
| (SEQ ID NO: | | | | | | |
| 1825) | | | | | | |
| TP53, AWAA | A02.01 | WMTETLFDI | 1572 | 7.0 | 14.0 | 4 |
| (SEQ ID NO: | | | | | | |
| 1826) | | | | | | |
| TP53, AWAA | A02.01 | WMTETLFDIV | 1573 | 15.0 | 40.0 | 0.4 |
| (SEQ ID NO: | | | | | | |
| 1826) | | | | | | |
| TP53, AWAA | A24.02 | WMTETLFDI | 1572 | 4936.0 | 713.0 | 0 |
| (SEQ ID NO: | | | | | | |
| 1826) | | | | | | |
| TP53, AWAA | A01.01 | WMTETLFDIV | 1573 | 4046.0 | 14394.0 | 0 |
| (SEQ ID NO: | | | | | | |
| 1826) | | | | | | |
| TP53, CSES | B07.02 | LPSQRRNHWM | 1581 | 89.0 | 10.0 | 6.5 |
| (SEQ ID NO: | | | | | | |
| 1827) | | | | | | |
| TP53, CSES | B08.01 | LPSQRRNHWM | 1581 | 325.0 | 47.0 | 0.7 |
| (SEQ ID NO: | | | | | | |
| 1827) | | | | | | |
| TP53, CSES | A02.01 | ALSEHCPTT | 1576 | 208.0 | 79.0 | 27.3 |
| (SEQ ID NO: | | | | | | |
| 1827) | | | | | | |
| TP53, G245S | B08.01 | CMGSMNRRPI | 216 | 1204.0 | 80.0 | 0 |
| TP53, G245S | A02.01 | YMCNSSCMGS | 1030 | 2485.0 | 81.0 | 0.8 |
| TP53, G245S | B08.01 | SMNRRPILTI | 211 | 260.0 | 337.0 | 0 |
| TP53, G245S | A02.01 | SMNRRPILTI | 211 | 1644.0 | 1198.0 | 0.3 |
| TP53, G245S | B08.01 | SMNRRPILT | 1029 | 2536.0 | 1282.0 | 0 |
| TP53, G245S | A02.01 | CMGSMNRRPI | 216 | 7822.0 | 1989.0 | 0 |
| TP53, G245S | A02.01 | SMNRRPILT | 1029 | 7251.0 | 3839.0 | 0 |
| TP53, G245S | A24.02 | SMNRRPILTI | 211 | 10308.0 | 16292.0 | 0 |
| TP53, G245S | B08.01 | GSMNRRPIL | 208 | 636.7 | 15.5 | not |
| | | | | | | measured |
| TP53, G245S | B08.01 | MGSMNRRPIL | 214 | 89.1 | 6.3 | not |
| | | | | | | measured |
| TP53, G245S | B08.01 | MGSMNRRPI | 209 | 324.2 | 29.1 | not |
| | | | | | | measured |
| TP53, QPSL | B07.02 | LPRKPTRAAT | 795 | 47.0 | 3.0 | 3.7 |
| (SEQ ID NO: | | | | | | |
| 1828) | | | | | | |
| TP53, QPSL | B07.02 | LPRKPTRAA | 794 | 8.0 | 8.0 | 5.5 |
| (SEQ ID NO: | | | | | | |
| 1828) | | | | | | |
| TP53, QPSL | B07.02 | KPTRAATVSV | 788 | 12.0 | 8.0 | 3 |
| (SEQ ID NO: | | | | | | |
| 1828) | | | | | | |
| TP53, QPSL | B08.01 | LPRKPTRAA | 794 | 873.0 | 1158.0 | 0 |
| (SEQ ID NO: | | | | | | |
| 1828) | | | | | | |
| TP53, R248Q | B08.01 | NQRPILTII | 221 | 3433.0 | 20.0 | 0 |
| TP53, R248Q | A02.01 | GMNQRPILTI | 223 | 1787.0 | 709.0 | 0.4 |
| TP53, R248Q | A02.01 | GMNQRPILT | 1031 | 8115.0 | 3029.0 | 0 |
| TP53, R248Q | A02.01 | CMGGMNQRPI | 222 | 3025.0 | 3673.0 | 0 |
| TP53, R248Q | A02.01 | NQRPILTII | 221 | 10855.0 | 9606.0 | 0 |
| TP53, R248Q | B08.01 | CMGGMNQRPI | 222 | 6364.0 | 18766.0 | 0 |
| TP53, R248Q | B08.01 | GMNQRPILTI | 223 | 3266.0 | 29251.0 | 0 |
| TP53, R248W | B08.01 | MNWRPILTI | 229 | 6447.0 | 1.0 | 0 |
| TP53, R248W | A02.01 | GMNWRPILTI | 231 | 189.0 | 282.0 | 0.5 |
| TP53, R248W | A02.01 | CMGGMNWRPI | 230 | 354.0 | 346.0 | 0.4 |
| TP53, R248W | A02.01 | MNWRPILTI | 229 | 5834.0 | 516.0 | 3.8 |
| TP53, R248W | A02.01 | MNWRPILTII | 233 | 8158.0 | 1026.0 | 0.4 |
| TP53, R248W | B08.01 | GMNWRPILTI | 231 | 3990.0 | 1045.0 | 0 |
| TP53, R248W | A02.01 | GMNWRPILT | 1032 | 3416.0 | 1130.0 | 0 |
| TP53, R248W | B08.01 | CMGGMNWRPI | 230 | 3218.0 | 2248.0 | 0 |
| TP53, R248W | A24.02 | CMGGMNWRPI | 230 | 9521.0 | 4453.0 | 0 |
| TP53, R248W | A24.02 | MNWRPILTI | 229 | 3634.0 | 6977.0 | 0.2 |
| TP53, R248W | A24.02 | MNWRPILTII | 233 | 1517.0 | 44901.0 | 0 |
| TP53, R273C | A02.01 | LLGRNSFEVC | 1033 | 1272.0 | 2081.0 | 0 |
| TP53, R273C | A02.01 | NSFEVCVCA | 235 | 4239.0 | 2200.0 | 0 |
| TP53, R273H | A02.01 | NSFEVHVCA | 1773 | 6768.0 | 503.0 | 0 |
| TP53, SHST | B07.02 | HPRPAPASA | 1605 | 13.0 | 11.0 | 4.9 |
| (SEQ ID NO: | | | | | | |
| 1829) | | | | | | |
| TP53, SHST | B08.01 | HPRPAPASA | 1605 | 1718.0 | 25.0 | 0 |
| (SEQ ID NO: | | | | | | |
| 1829) | | | | | | |
| TP53, Y220C | A02.01 | VVPCEPPEV | 1774 | 1268.0 | 187.0 | 0.9 |
| TTK(−1) | A02.01 | VMSDTTYKI | 1180 | 15.8 | 19.6 | not |
| | | | | | | measured |
| TTK(−1) | A03.01 | LFVMSDTTYK | 1178 | 57.9 | 749.4 | not |
| | | | | | | measured |
| TTK(−1) | A02.01 | FVMSDTTYKI | 1176 | 16.0 | 62.4 | not |
| | | | | | | measured |
| TTK(−1) | A03.01 | FVMSDTTYK | 1175 | 63.1 | 66.9 | not |
| | | | | | | measured |
| TTK(−1) | A03.01 | KTFEKKGEK | 1177 | 81.3 | 32.2 | not |
| | | | | | | measured |
| TTK(−1) | A01.01 | VMSDTTYKIY | 1181 | 245.1 | 375.8 | not |
| | | | | | | measured |
| TTK(−1) | A01.01 | MSDTTYKIY | 1179 | 18.9 | 10.2 | not |
| | | | | | | measured |
| UBR5(−1) | B07.02 | RVQNQGHLL | 1809 | 429.1 | 826.5 | not |
| | | | | | | measured |
| VHL, QCIL | A02.01 | MLTDSLFLPI | 866 | 8.0 | 16.0 | 1 |
| (SEQ ID NO: | | | | | | |
| 1830) | | | | | | |
| VHL, QCIL | A02.01 | SMLTDSLFL | 877 | 14.0 | 31.0 | 9.8 |
| (SEQ ID NO: | | | | | | |
| 1830) | | | | | | |
| VHL, QCIL | B08.01 | MLTDSLFLPI | 866 | 2581.0 | 110.0 | 0 |
| (SEQ ID NO: | | | | | | |
| 1830) | | | | | | |
| VHL, QCIL | A01.01 | MLTDSLFLPI | 866 | 429.0 | 7673.0 | 0 |
| (SEQ ID NO: | | | | | | |
| 1830) | | | | | | |
| XPOT(−1) | A02.01 | YLTKWPKFFL | 1182 | 10.7 | 42.9 | not |
| | | | | | | measured |

### Example 3: HLA Class I Binding Stability

[0625] A subset of the peptides used for affinity measurements were also used for stability measurements using the assay described (n=275). These data are shown in Table 3. The data are plotted according to 4 bins in FIG. 2, with the median and interquartile intervals overlaid. Less than 50 nM was considered by the field as a strong binder, 50-150 nM was considered an intermediate binder, 150-500 nM was considered a weak binder, and greater than 500 nM was considered a very weak binder. The connection between the observed stability and observed affinity was evident by the decreasing median stability across these binned stability intervals. However, there is considerable overlap between the bins, and importantly there are epitopes in all bins with observed stability in the multiple hour range, including the very weak binders.

### Example 4: Immunogenicity Assays

[0626] Immunogenicity assays are used to test the ability of each test peptide to expand T cells. Mature professional APCs are prepared for these assays in the following way. Monocytes are enriched from healthy human donor PBMCs using a bead-based kit (Miltenyi). Enriched cells are plated in GM-CSF and IL-4 to induce immature DCs. After 5 days, immature DCs are incubated at 37° C. with each peptide for 1 hour before addition of a cytokine maturation cocktail (GM-CSF, IL-10, IL-4, IL-6, TNFα, PGE1β). Cells are incubated at 37° C. to mature DCs.

[0627] After maturation of DCs, PBMCs (either bulk or enriched for T cells) are added to mature dendritic cells with proliferation cytokines. Cultures are monitored for peptide-specific T cells using a combination of functional assays and/or tetramer staining. Parallel immunogenicity assays with the modified and parent peptides allowed for comparisons of the relative efficiency with which the peptides expanded peptide-specific T cells.

[0628] Tetramer Staining.

[0629] MHC tetramers are purchased or manufactured on-site, and are used to measure peptide-specific T cell expansion in the immunogenicity assays. For the assessment, tetramer is added to 1×10⁵ cells in PBS containing 1% FCS and 0.1% sodium azide (FACS buffer) according to manufacturer's instructions. Cells are incubated in the dark for 20 minutes at room temperature. Antibodies specific for T cell markers, such as CD8, are then added to a final concentration suggested by the manufacturer, and the cells are incubated in the dark at 4° C. for 20 minutes. Cells are washed with cold FACS buffer and resuspended in buffer containing 1% formaldehyde. Cells are acquired on a FACS Calibur (Becton Dickinson) instrument, and are analyzed by use of Cellquest software (Becton Dickinson). For analysis of tetramer positive cells, the lymphocyte gate is taken from the forward and side-scatter plots. Data are reported as the percentage of cells that were CD8⁺/Tetramer⁺.

[0630] Intracellular Cytokine Staining.

[0631] In the absence of well-established tetramer staining to identify antigen-specific T cell populations, antigen-specificity can be estimated using assessment of cytokine production using well-established flow cytometry assays. Briefly, T cells are stimulated with the peptide of interest and compared to a control. After stimulation, production of cytokines by CD4⁺ T cells (e.g., IFNγ and TNFα) are assessed by intracellular staining. These cytokines, especially IFNγ, used to identify stimulated cells.

[0632] ELISPOT.

[0633] Peptide-specific T cells are functionally enumerated using the ELISPOT assay (BD Biosciences), which measures the release of IFNgamma from T cells on a single cell basis. Target cells (T2 or HLA-A0201 transfected C1Rs) were pulsed with 10 uM peptide for 1 hour at 37° C., and washed three times. 1×10⁵ peptide-pulsed targets are co-cultured in the ELISPOT plate wells with varying concentrations of T cells (5×10² to 2×10³) taken from the immunogenicity culture. Plates are developed according to the manufacturer's protocol, and analyzed on an ELISPOT reader (Cellular Technology Ltd.) with accompanying software. Spots corresponding to the number of IFNgamma-producing T cells are reported as the absolute number of spots per number of T cells plated. T cells expanded on modified peptides are tested not only for their ability to recognize targets pulsed with the modified peptide, but also for their ability to recognize targets pulsed with the parent peptide.

[0634] CD107 Staining.

[0635] CD107a and b are expressed on the cell surface of CD8⁺ T cells following activation with cognate peptide. The lytic granules of T cells have a lipid bilayer that contains lysosomal-associated membrane glycoproteins (“LAMPs”), which include the molecules CD107a and b. When cytotoxic T cells are activated through the T cell receptor, the membranes of these lytic granules mobilize and fuse with the plasma membrane of the T cell. The granule contents are released, and this leads to the death of the target cell. As the granule membrane fuses with the plasma membrane, C107a and b are exposed on the cell surface, and therefore are markers of degranulation. Because degranulation as measured by CD107 a and b staining is reported on a single cell basis, the assay is used to functionally enumerate peptide-specific T cells. To perform the assay, peptide is added to HLA-A0201-transfected cells C1R to a final concentration of 20 μM, the cells were incubated for 1 hour at 37° C., and washed three times. 1×10⁵ of the peptide-pulsed CIR cells were aliquoted into tubes, and antibodies specific for CD107 a and b are added to a final concentration suggested by the manufacturer (Becton Dickinson). Antibodies are added prior to the addition of T cells in order to “capture” the CD107 molecules as they transiently appear on the surface during the course of the assay. 1×10⁵ T cells from the immunogenicity culture are added next, and the samples were incubated for 4 hours at 37° C. The T cells are further stained for additional cell surface molecules such as CD8 and acquired on a FACS Calibur instrument (Becton Dickinson). Data is analyzed using the accompanying Cellquest software, and results were reported as the percentage of CD8⁺ CD107 a and b⁺ cells.

[0636] Cytotoxicity Assays.

[0637] Cytotoxic activity is measured using a chromium release assay. Target T2 cells are labeled for 1 hour at 37° C. with Na⁵¹Cr and washed 5×10³ target T2 cells were then added to varying numbers of T cells from the immunogenicity culture. Chromium release is measured in supernatant harvested after 4 hours of incubation at 37° C. The percentage of specific lysis is calculated as:

Experimental release-spontaneous release/Total release-spontaneous release×100

[0638] Immunogenicity assays were carried out to assess whether each peptide can elicit a T cell response by antigen-specific expansion. Though current methods are imperfect, and therefore negative results do not imply a peptide is incapable of inducing a response, a positive result demonstrates that a peptide can induce a T cell response. Several peptides from Table 3 were tested for their capacity to elicit CD8⁺ T cell responses with multimer readouts as described. Each positive result was measured with a second multimer preparation to avoid any preparation biases. Several examples of positive multimer staining are shown in FIGS. 3-6, with multimer negative cells (left) and antigen-specific (multimer-double-positive) cells (right) shown.

[0639] HLA-A02:01⁺ T cells were co-cultured with monocyte-derived dendritic cells loaded with TMPRSS2::ERG fusion neoepitope (ALNSEALSV (SEQ ID NO: 140); HLA-A02:01) for 10 days. CD8⁺ T cells were analyzed for antigen-specificity for TMPRSS2::ERG fusion neoepitope using multimers (initial: BV421 and PE; validation: APC and BUV396) (FIG. 3).

[0640] HLA-A02:01⁺ T cells were co-cultured with monocyte-derived dendritic cells loaded with GATA3 frameshift neoepitope (SMLTGPPARV (SEQ ID NO: 141); HLA-A02:01) for 10 days. CD8⁺ T cells were analyzed for antigen-specificity for GATA3 frameshift neoepitope using multimers (initial: APC and BUV396; validation: PE and BV421) (FIG. 4).

[0641] HLA-A02:01⁺ T cells were co-cultured with monocyte-derived dendritic cells loaded with β2M frameshift neoepitope (LLCVWVSSI (SEQ ID NO: 142); HLA-A02:01) for 10 days. CD8⁺ T cells were analyzed for antigen-specificity for β2M frameshift neoepitope using multimers (initial: PE and APC; validation: PE and BV421) (FIG. 5).

[0642] HLA-A02:01⁺ T cells were co-cultured with monocyte-derived dendritic cells loaded with KRAS G12C neoepitope (KLVVVGACGV (SEQ ID NO: 143); HLA-A02:01) for 10 days. CD8⁺ T cells were analyzed for antigen-specificity for KRAS G12C frameshift neoepitope using multimers (initial: BUV396 and BV421; validation: APC and BUV396) (FIG. 6).

[0643] While antigen-specific CD8⁺ T cell responses are readily assessed using well-established HLA Class I multimer technology, CD4⁺ T cell responses require a separate assay to evaluate because HLA Class II multimer technology is not well-established. In order to assess CD4⁺ T cell responses, T cells were re-stimulated with the peptide of interest and compared to a control. In the case of a completely novel sequence (e.g., arising from a frame-shift or fusion), the control was no peptide. In the case of a point-mutation, the control was the WT peptide. After stimulation, production of cytokines by CD4⁺ T cells (e.g., IFNγ and TNFα) were assessed by intracellular staining. These cytokines, especially IFNγ, used to identify stimulated cells. Antigen-specific CD4⁺ T cell responses showed increased cytokine production relative to control. Examples of antigen-specific CD4⁺ T cell responses generated against neopeptides are shown in FIGS. 7-9.

[0644] T cells were co-cultured with monocyte-derived dendritic cells loaded β2M frameshift neopeptides for 20 days (restimulation with fresh monocyte-derived dendritic cells on day 20). CD4⁺ T cells were analyzed for antigen-specificity by intracellular cytokine staining after restimulation with monocyte-derived dendritic cells loaded with β2M frameshift peptide for 24 hours, compared to controls without peptide (FIG. 7).

[0645] Naïve T cells were co-cultured with monocyte-derived dendritic cells loaded BTK C481S neopeptide for 20 days (restimulation with fresh monocyte-derived dendritic cells on day 20). CD4⁺ T cells were analyzed for antigen-specificity by intracellular cytokine staining after restimulation with monocyte-derived dendritic cells loaded with BTK C481S neopeptide for 24 hours, compared to controls wild-type BTK peptide (FIG. 8).

[0646] Naïve T cells were co-cultured with monocyte-derived dendritic cells loaded GATA3 frameshift neopeptides for 20 days (restimulation with fresh monocyte-derived dendritic cells on day 20). CD4⁺ T cells were analyzed for antigen-specificity by intracellular cytokine staining after restimulation with monocyte-derived dendritic cells loaded with GATA3 frameshift peptide for 24 hours, compared to controls without peptide (FIG. 9).

### Example 5: Selection of CTL and HTL Epitopes for Inclusion in an Tumor-Specific Vaccine

[0647] This example illustrates the procedure for the selection of peptide epitopes for vaccine compositions of the invention. The peptides in the composition can be in the form of a nucleic acid sequence, either single or one or more sequences (i.e., minigene) that encodes peptide(s), or may be single and/or polyepitopic peptides.

[0648] Epitopes are selected which, upon administration, mimic immune responses that have been observed to be correlated with tumor clearance. For example, vaccine can include 1-2 epitopes that come from at least one tumor antigen region. Epitopes from one region can be used in combination with epitopes from one or more additional tumor antigen regions.

[0649] Epitopes can be selected, for example, that have a binding affinity of an IC₅₀ of 500 nM or less for an HLA class I molecule, or for class II, an IC₅₀ of 1000 nM or less.

[0650] When creating a polyepitopic compositions, e.g. a minigene, it is typically desirable to generate the smallest peptide possible that encompasses the epitopes of interest. The principles employed are similar, if not the same, as those employed when selecting a peptide comprising nested epitopes. Additionally, however, upon determination of the nucleic acid sequence to be provided as a minigene, the peptide sequence encoded thereby is analyzed to determine whether any “junctional epitopes” have been created. A junctional epitope is a potential HLA binding epitope, e.g., as predictedby motif analysis. Junctional epitopes are generally to be avoided because the recipient may bind to an HLA molecule and generate an immune response to that epitope, which is not present in a native protein sequence.

[0651] Peptide epitopes for inclusion in vaccine compositions are, for example, selected from those listed in the Tables. A vaccine composition comprised of selected peptides, when administered, is safe, efficacious, and elicits an immune response similar in magnitude of an immune response that inhibits tumor growth.

### Example 6: Peptide Composition for Prophylactic or Therapeutic Uses

[0652] Immunogenic or vaccine compositions of the invention are used to inhibit tumor growth. For example, a polyepitopic composition (or a nucleic acid comprising the same) containing multiple CTL and HTL epitopes is administered to individuals having tumors. The dose of peptide for the immunization is from about 1 to about 50,000 μg, generally 100-5,000 μg, for a 70 kg patient. The initial administration may be followed by booster dosages at 4 weeks followed by evaluation of the magnitude of the immune response in the patient, by techniques that determine the presence of epitope-specific CTL populations in a PBMC sample. Additional booster doses are administered as required. The composition is found to be both safe and efficacious to inhibit tumor growth.

[0653] Alternatively, the polyepitopic composition can be administered as a nucleic acid, for example as RNA, in accordance with methodologies known in the art and disclosed herein.

[0654] Neoantigen binding agents, such as TCR or CARs can be can be administered in accordance with methodologies known in the art and disclosed herein. The binding agents can be administered as polynucleotides, for example DNA or RNA, encoding the binding agents as part of cellular therapy. Alternatively, the binding agents can be prepared as antibodies or fragments thereof capable of recognizing the specific peptide:MHC complex coupled to cytotoxic agents or T cell binding agents capable of re-directing patient T cells to tumor cells expressing the epitopes listed in the Tables.

[0655] Neoantigen peptides, polynucleotides, binding agents, or cells expressing these molecules can be delivered to the same patient via multiple methodologies known in the art, and can further be combined with other cancer therapies (e.g., chemotherapy, surgery, radiation, checkpoint inhibitors, etc.).

### Example 7: Administration of Compositions Using Dendritic Cells

[0656] Vaccines comprising epitopes of the invention may be administered using dendritic cells. In this example, peptide-pulsed or nucleic acid-pulsed dendritic cells can be administered to a patient to stimulate a CTL response in vivo. In this method dendritic cells are isolated, expanded, and pulsed with a vaccine comprising peptide or encoding DNA or RNA CTL and HTL epitopes of the invention. The dendritic cells are infused back into the patient to elicit CTL and HTL responses in vivo. The induced CTL and HTL then destroy (CTL) or facilitate destruction (HTL) of the specific target tumor cells that bear the proteins from which the epitopes in the vaccine are derived.

[0657] Alternatively, ex vivo CTL or HTL responses to a particular tumor-associated antigen can be induced by incubating in tissue culture the patient's, or genetically compatible, CTL or HTL precursor cells together with a source of antigen-presenting cells, such as dendritic cells, and the appropriate immunogenic peptides or nucleic acids. After an appropriate incubation time (typically about 7-28 days), in which the precursor cells are activated and expanded into effector cells, the cells are infused back into the patient, where they will destroy (CTL) or facilitate destruction (HTL) of their specific target cells, i.e., tumor cells.

### Example 8: Identification of Neoepitopes

[0658] Cancer cells containing distinct genetic changes that alter amino acid sequence could generate potential novel T cell epitopes, such as those shown in the Tables. Identifying which patient's tumors contain tumor-specific neoepitopes as identified in the Tables can comprise identification of DNA mutations. As one approach, whole genome or whole exome sequencing using well-established techniques of tumor versus matched germline samples from patients can be carried out. As an additional approach, RNA sequencing of tumor and appropriately matched normal samples may also be conducted. As an additional approach, specific assays based on targeted sequencing, either next generation sequencing techniques or well-established Sanger sequencing can also be conducted. Additionally, highly specific Polymerase-chain reaction based assays may be developed.

### Example 9: Specificity of Neoantigen Peptide Recognition by CD8⁺ or CD4⁺ Cells

[0659] In various embodiments, the present teachings include disclosure of discrimination between mutated and wild-type sequences by vaccine-induced CD8⁺ cells. To determine whether vaccine-induced T cells could recognize naturally processed antigen, a tumor cell line can be transduced with a multi-mini-gene construct encoding mutated (MUT) or wild-type (WT) sequences of peptides incorporated into a vaccine. Each minigene can consists of 21 aa encoding either the MUT or WT sequences. Vaccine-induced cells, specific for a protein containing a particular mutation can be incubated with MUT or WT expressing cancer cells, supernatants can be collected after 24 h of incubation, and IFN-γ produced by cells can be measured in supernatants by ELISA.

[0660] Neoantigen-specific cells recognition of mutated and wild type peptides can also be determined in a standard 4 h ⁵¹Cr-release assay.

The application's sequence listing, which the Patent Office published only in electronic form, follows.

SEQUENCE LISTING (1834 sequences)

SEQ ID NO: 1 - protein, 101 aa, Artificial Sequence
  Description of Artificial Sequence: Synthetic polypeptide
VADGLITTLHYPAPKRNKPTVYGVSPNYDKWEMERTDITMKHKLGGGQYGKVYEGVWKKYSLTVAVKTLKEDTMEVEEFLKEAAVMKEIKHPNLVQLLGVC

SEQ ID NO: 2 - protein, 101 aa, Artificial Sequence
  Description of Artificial Sequence: Synthetic polypeptide
VADGLITTLHYPAPKRNKPTVYGVSPNYDKWEMERTDITMKHKLGGGQYGVVYEGVWKKYSLTVAVKTLKEDTMEVEEFLKEAAVMKEIKHPNLVQLLGVC

SEQ ID NO: 3 - protein, 101 aa, Artificial Sequence
  Description of Artificial Sequence: Synthetic polypeptide
LLGVCTREPPFYIITEFMTYGNLLDYLRECNRQEVNAVVLLYMATQISSATEYLEKKNFIHRDLAARNCLVGENHLVKVADFGLSRLMTGDTYTAHAGAKF

SEQ ID NO: 4 - protein, 101 aa, Artificial Sequence
  Description of Artificial Sequence: Synthetic polypeptide
SLTVAVKTLKEDTMEVEEFLKEAAVMKEIKHPNLVQLLGVCTREPPFYIIIEFMTYGNLLDYLRECNRQEVNAVVLLYMATQISSAMEYLEKKNFIHRDLA

SEQ ID NO: 5 - protein, 101 aa, Artificial Sequence
  Description of Artificial Sequence: Synthetic polypeptide
STVADGLITTLHYPAPKRNKPTVYGVSPNYDKWEMERTDITMKHKLGGGQHGEVYEGVWKKYSLTVAVKTLKEDTMEVEEFLKEAAVMKEIKHPNLVQLLG

SEQ ID NO: 6 - protein, 101 aa, Artificial Sequence
  Description of Artificial Sequence: Synthetic polypeptide
SSLAMLDLLHVARDIACGCQYLEENHFIHRDIAARNCLLTCPGPGRVAKIADFGMARDIYRASYYRKGGCAMLPVKWMPPEAFMEGIFTSKTDTWSFGVLL

SEQ ID NO: 7 - protein, 101 aa, Artificial Sequence
  Description of Artificial Sequence: Synthetic polypeptide
QVAVKTLPEVCSEQDELDFLMEALIISKFNHQNIVRCIGVSLQSLPRFILMELMAGGDLKSFLRETRPRPSQPSSLAMLDLLHVARDIACGCQYLEENHFI

SEQ ID NO: 8 - protein, 101 aa, Artificial Sequence
  Description of Artificial Sequence: Synthetic polypeptide
MIKLIDIARQTAQGMDYLHAKSIIHRDLKSNNIFLHEDLTVKIGDFGLATEKSRWSGSHQFEQLSGSILWMAPEVIRMQDKNPYSFQSDVYAFGIVLYELM

SEQ ID NO: 9 - protein, 101 aa, Artificial Sequence
  Description of Artificial Sequence: Synthetic polypeptide
MIKEGSMSEDEFIEEAKVMMNLSHEKLVQLYGVCTKQRPIFIITEYMANGSLLNYLREMRHRFQTQQLLEMCKDVCEAMEYLESKQFLHRDLAARNCLVND

SEQ ID NO: 10 - protein, 93 aa, Artificial Sequence
  Description of Artificial Sequence: Synthetic polypeptide
MGFGDLKSPAGLQVLNDYLADKSYIEGYVPSQADVAVFEAVSGPPPADLCHALRWYNHIKSYEKEKASLPGVKKALGKYGPADVEDTTGSGAT

SEQ ID NO: 11 - protein, 101 aa, Artificial Sequence
  Description of Artificial Sequence: Synthetic polypeptide
SLNITSLGLRSLKEISDGDVIISGNKNLCYANTINWKKLFGTSGQKTKIIRNRGENSCKATGQVCHALCSPEGCWGPEPRDCVSCRNVSRGRECVDKCNLL

SEQ ID NO: 12 - protein, 101 aa, Artificial Sequence
  Description of Artificial Sequence: Synthetic polypeptide
IPVAIKELREATSPKANKEILDEAYVMASVDNPHVCRLLGICLTSTVQLIMQLMPFGCLLDYVREHKDNIGSQYLLNWCVQIAKGMNYLEDRRLVHRDLAA

SEQ ID NO: 13 - protein, 101 aa, Artificial Sequence
  Description of Artificial Sequence: Synthetic polypeptide
ERCEVVMGNLEIVLTGHNADLSFLQWIREVTGYVLVAMNEFSTLPLPNLRMVRGTQVYDGKFAIFVMLNYNTNSSHALRQLRLTQLTEILSGGVYIEKNDK

SEQ ID NO: 14 - protein, 101 aa, Artificial Sequence
  Description of Artificial Sequence: Synthetic polypeptide
HLMAKAGLTLQQQHQRLAQLLLILSHIRHMSNKGMEHLYSMKCKNVVPLYGLLLEMLDAHRLHAPTSRGGASVEETDQSHLATAGSTSSHSLQKYYITGEA

SEQ ID NO: 15 - protein, 101 aa, Artificial Sequence
  Description of Artificial Sequence: Synthetic polypeptide
NQGKCVEGMVEIFDMLLATSSRFRMMNLQGEEFVCLKSIILLNSGVYTFLPSTLKSLEEKDHIHRVLDKITDTLIHLMAKAGLTLQQQHQRLAQLLLILSH

SEQ ID NO: 16 - protein, 101 aa, Artificial Sequence
  Description of Artificial Sequence: Synthetic polypeptide
IHLMAKAGLTLQQQHQRLAQLLLILSHIRHMSNKGMEHLYSMKCKNVVPLCDLLLEMLDAHRLHAPTSRGGASVEETDQSHLATAGSTSSHSLQKYYITGE

SEQ ID NO: 17 - protein, 101 aa, Artificial Sequence
  Description of Artificial Sequence: Synthetic polypeptide
IHLMAKAGLTLQQQHQRLAQLLLILSHIRHMSNKGMEHLYSMKCKNVVPLNDLLLEMLDAHRLHAPTSRGGASVEETDQSHLATAGSTSSHSLQKYYITGE

SEQ ID NO: 18 - protein, 101 aa, Artificial Sequence
  Description of Artificial Sequence: Synthetic polypeptide
IHLMAKAGLTLQQQHQRLAQLLLILSHIRHMSNKGMEHLYSMKCKNVVPLSDLLLEMLDAHRLHAPTSRGGASVEETDQSHLATAGSTSSHSLQKYYITGE

SEQ ID NO: 19 - protein, 101 aa, Artificial Sequence
  Description of Artificial Sequence: Synthetic polypeptide
HRIGGIKLRHQQWSLVMESVVPSDRGNYTCVVENKFGSIRQTYTLDVLERCPHRPILQAGLPANQTAVLGSDVEFHCKVYSDAQPHIQWLKHVEVNGSKVG

SEQ ID NO: 20 - protein, 101 aa, Artificial Sequence
  Description of Artificial Sequence: Synthetic polypeptide
AVKLSDSRIALKSGYGKYLGINSDELVGHSDAIGPREQWEPVFQNGKMALSASNSCFIRCNEAGDIEAKSKTAGEEEMIKIRSCAEKETKKKDDIPEEDKG

SEQ ID NO: 21 - protein, 101 aa, Artificial Sequence
  Description of Artificial Sequence: Synthetic polypeptide
GSGAFGTVYKGIWIPDGENVKIPVAIKVLRENTSPKANKEILDEAYVMAGLGSPYVSRLLGICLTSTVQLVTQLMPYGCLLDHVRENRGRLGSQDLLNWCM

SEQ ID NO: 22 - protein, 101 aa, Artificial Sequence
  Description of Artificial Sequence: Synthetic polypeptide
RVEEFKLKQMWKSPNGTIRNILGGTVFREAIICKNIPRLVSGWVKPIIIGHHAYGDQYRATDFVVPGPGKVEITYTPSDGTQKVTYLVHNFEEGGGVAMGM

SEQ ID NO: 23 - protein, 101 aa, Artificial Sequence
  Description of Artificial Sequence: Synthetic polypeptide
RVEEFKLKQMWKSPNGTIRNILGGTVFREAIICKNIPRLVSGWVKPIIIGCHAYGDQYRATDFVVPGPGKVEITYTPSDGTQKVTYLVHNFEEGGGVAMGM

SEQ ID NO: 24 - protein, 101 aa, Artificial Sequence
  Description of Artificial Sequence: Synthetic polypeptide
RVEEFKLKQMWKSPNGTIRNILGGTVFREAIICKNIPRLVSGWVKPIIIGGHAYGDQYRATDFVVPGPGKVEITYTPSDGTQKVTYLVHNFEEGGGVAMGM

SEQ ID NO: 25 - protein, 101 aa, Artificial Sequence
  Description of Artificial Sequence: Synthetic polypeptide
RVEEFKLKQMWKSPNGTIRNILGGTVFREAIICKNIPRLVSGWVKPIIIGSHAYGDQYRATDFVVPGPGKVEITYTPSDGTQKVTYLVHNFEEGGGVAMGM

SEQ ID NO: 26 - protein, 101 aa, Artificial Sequence
  Description of Artificial Sequence: Synthetic polypeptide
VEATAYGLIKSDAAMTVAVKMLKPSAHLTEREALMSELKVLSYLGNHMNIANLLGACTIGGPTLVITEYCCYGDLLNFLRRKRDSFICSKQEDHAEAALYK

SEQ ID NO: 27 - protein, 101 aa, Artificial Sequence
  Description of Artificial Sequence: Synthetic polypeptide
ISELGAGNGGVVFKVSHKPSGLVMARKLIHLEIKPAIRNQIIRELQVLHESNSPYIVGFYGAFYSDGEISICMEHMDGGSLDQVLKKAGRIPEQILGKVSI

SEQ ID NO: 28 - protein, 101 aa, Artificial Sequence
  Description of Artificial Sequence: Synthetic polypeptide
LGAGNGGVVFKVSHKPSGLVMARKLIHLEIKPAIRNQIIRELQVLHECNSLYIVGFYGAFYSDGEISICMEHMDGGSLDQVLKKAGRIPEQILGKVSIAVI

SEQ ID NO: 29 - protein, 89 aa, Artificial Sequence
  Description of Artificial Sequence: Synthetic polypeptide
MPLNVSFTNRNYDLDYDSVQPYFYCDEEENFYQQQQQSDLQPPAPSEDIWKKFELLPTPPLSPSRRSGLCSPSYVAVTPFSLRGDNDGG

SEQ ID NO: 30 - protein, 101 aa, Artificial Sequence
  Description of Artificial Sequence: Synthetic polypeptide
FTNRNYDLDYDSVQPYFYCDEEENFYQQQQQSELQPPAPSEDIWKKFELLSTPPLSPSRRSGLCSPSYVAVTPFSLRGDNDGGGGSFSTADQLEMVTELLG

SEQ ID NO: 31 - protein, 101 aa, Artificial Sequence
  Description of Artificial Sequence: Synthetic polypeptide
TNRNYDLDYDSVQPYFYCDEEENFYQQQQQSELQPPAPSEDIWKKFELLPIPPLSPSRRSGLCSPSYVAVTPFSLRGDNDGGGGSFSTADQLEMVTELLGG

SEQ ID NO: 32 - protein, 101 aa, Artificial Sequence
  Description of Artificial Sequence: Synthetic polypeptide
VAVKMLKPTARSSEKQALMSELKIMTHLGPHLNIVNLLGACTKSGPIYIIIEYCFYGDLVNYLHKNRDSFLSHHPEKPKKELDIFGLNPADESTRSYVILS

SEQ ID NO: 33 - protein, 101 aa, Artificial Sequence
  Description of Artificial Sequence: Synthetic polypeptide
IEEHANWSVSREAGFSYSHAGLSNRLARDNELRENDKEQLKAISTRDPLSKITEQEKDFLWSHRHYCVTIPEILPKLLLSVKWNSRDEVAQMYCLVKDWPP

SEQ ID NO: 34 - protein, 101 aa, Artificial Sequence
  Description of Artificial Sequence: Synthetic polypeptide
HANWSVSREAGFSYSHAGLSNRLARDNELRENDKEQLKAISTRDPLSEITKQEKDFLWSHRHYCVTIPEILPKLLLSVKWNSRDEVAQMYCLVKDWPPIKP

SEQ ID NO: 35 - protein, 72 aa, Artificial Sequence
  Description of Artificial Sequence: Synthetic polypeptide
LFINLFSMMLGSGMPELQSFDDIAYIRKTLALDKTEQEALEYFMKQMNDARHGGWTTKMDWIFHTIKQHALN

SEQ ID NO: 36 - protein, 101 aa, Artificial Sequence
  Description of Artificial Sequence: Synthetic polypeptide
QRGGVITDEEETSKKIADQLDNIVDMREYDVPYHIRLSIDIETTKLPLKFRDAETDQIMMISYMIDGQGYLITNREIVSEDIEDFEFTPKPEYEGPFCVFN

SEQ ID NO: 37 - protein, 101 aa, Artificial Sequence
  Description of Artificial Sequence: Synthetic polypeptide
KFNCRVAQYPFEDHNPPQLELIKPFCEDLDQWLSEDDNHVAAIHCKAGKGQTGVMICAYLLHRGKFLKAQEALDFYGEVRTRDKKGVTIPSQRRYVYYYSY

SEQ ID NO: 38 - protein, 79 aa, Artificial Sequence
  Description of Artificial Sequence: Synthetic polypeptide
MQAIKCVVVGDGAVGKTCLLISYTTNAFSGEYIPTVFDNYSANVMVDGKPVNLGLWDTAGQEDYDRLRPLSYPQTVGET

SEQ ID NO: 39 - protein, 101 aa, Artificial Sequence
  Description of Artificial Sequence: Synthetic polypeptide
IRVEGNLRVEYLDDRNTFRHSVVVPYEPPEVGSDCTTIHYNYMCNSSCMGSMNRRPILTIITLEDSSGNLLGRNSFEVRVCACPGRDRRTEEENLRKKGEP

SEQ ID NO: 40 - protein, 101 aa, Artificial Sequence
  Description of Artificial Sequence: Synthetic polypeptide
TYSPALNKMFCQLAKTCPVQLWVDSTPPPGTRVRAMAIYKQSQHMTEVVRHCPHHERCSDSDGLAPPQHLIRVEGNLRVEYLDDRNTFRHSVVVPYEPPEV

SEQ ID NO: 41 - protein, 101 aa, Artificial Sequence
  Description of Artificial Sequence: Synthetic polypeptide
EGNLRVEYLDDRNTFRHSVVVPYEPPEVGSDCTTIHYNYMCNSSCMGGMNQRPILTIITLEDSSGNLLGRNSFEVRVCACPGRDRRTEEENLRKKGEPHHE

SEQ ID NO: 42 - protein, 101 aa, Artificial Sequence
  Description of Artificial Sequence: Synthetic polypeptide
EGNLRVEYLDDRNTFRHSVVVPYEPPEVGSDCTTIHYNYMCNSSCMGGMNWRPILTIITLEDSSGNLLGRNSFEVRVCACPGRDRRTEEENLRKKGEPHHE

SEQ ID NO: 43 - protein, 101 aa, Artificial Sequence
  Description of Artificial Sequence: Synthetic polypeptide
PEVGSDCTTIHYNYMCNSSCMGGMNRRPILTIITLEDSSGNLLGRNSFEVCVCACPGRDRRTEEENLRKKGEPHHELPPGSTKRALPNNTSSSPQPKKKPL

SEQ ID NO: 44 - protein, 93 aa, Artificial Sequence
  Description of Artificial Sequence: Synthetic polypeptide
AKFQQCHSTLEPNPADCRVLVYLQNQPGTKLLNFLQERNLPPKVVLRHPKVHLNTMFRRPHSCLADVLLSVHLIVLRVVRLPAPFRVNHAVEW

SEQ ID NO: 45 - protein, 53 aa, Artificial Sequence
  Description of Artificial Sequence: Synthetic polypeptide
APVIFQIALDKPCHQAEVKHLHHLLKQLKPSEKYLKIKHLLLKRERVDLSKLQ

SEQ ID NO: 46 - protein, 33 aa, Artificial Sequence
  Description of Artificial Sequence: Synthetic polypeptide
MLQFRGSRFFQMLILYYILPRKVLQMDFLVHPA

SEQ ID NO: 47 - protein, 179 aa, Artificial Sequence
  Description of Artificial Sequence: Synthetic polypeptide
ALGPHSRISCLPTQTRGCILLAATPRSSSSSSSNDMIPMAISSPPKAPLLAAPSPASRLQCINSNSRITSGQWMAHMALLPSGTKGRCTACHTALGRGSLSSSSCPQPSPSLPASNKLPSLPLSKMYTTSMAMPILPLPQLLLSADQQAAPRTNFHSSLAETVSLHPLAPMPSKTCHHK

SEQ ID NO: 48 - protein, 79 aa, Artificial Sequence
  Description of Artificial Sequence: Synthetic polypeptide
AHQGFPAAKESRVIQLSLLSLLIPPLTCLASEALPRPLLALPPVLLSLAQDHSRLLQCQATRCHLGHPVASRTASCILP

SEQ ID NO: 49 - protein, 222 aa, Artificial Sequence
  Description of Artificial Sequence: Synthetic polypeptide
PILAATGTSVRTAARTWVPRAAIRVPDPAAVPDDHAGPGAECHGRPLLYTADSSLWTTRPQRVWSTGPDSILQPAKSSPSAAAATLLPATTVPDPSCPTFVSAAATVSTTTAPVLSASILPAAIPASTSAVPGSIPLPAVDDTAAPPEPAPLLTATGSVSLPAAATSAASTLDALPAGCVSSAPVSAVPANCLFPAALPSTAGAISRFIWVSGILSPLNDLQ

SEQ ID NO: 50 - protein, 185 aa, Artificial Sequence
  Description of Artificial Sequence: Synthetic polypeptide
PCRAGRRVPWAASLIHSRFLLMDNKAPAGMVNRARLHITTSKVLTLSSSSHPTPSNHRPRPLMPNLRISSSHSLNHHSSSPLSLHTPSSHPSLHISSPRLHTPPSSRRHSSTPRASPPTHSHRLSLLTSSSNLSSQHPRRSPSRLRILSPSLSSPSKLPIPSSASLHRRSYLKIHLGLRHPQPPQ

SEQ ID NO: 51 - protein, 58 aa, Artificial Sequence
  Description of Artificial Sequence: Synthetic polypeptide
RTNPTVRMRPHCVPFWTGRILLPSAASVCPIPFEACHLCQAMTLRCPNTQGCCSSWAS

SEQ ID NO: 52 - protein, 90 aa, Artificial Sequence
  Description of Artificial Sequence: Synthetic polypeptide
TNQALPKIEVICRGTPRCPSTVPPSPAQPYLRVSLPEDRYTQAWAPTSRTPWGAMVPRGVSMAHKVATPGSQTIMPCPMPTTPVQAWLEA

SEQ ID NO: 53 - protein, 41 aa, Artificial Sequence
  Description of Artificial Sequence: Synthetic polypeptide
RMERELKKWSIQTCLSARTGLSISCTTLNSPPLKKMSMPAV

SEQ ID NO: 54 - protein, 35 aa, Artificial Sequence
  Description of Artificial Sequence: Synthetic polypeptide
LCSRYSLFLAWRLSSVLQRFRFTHVIQQRMESQIS

SEQ ID NO: 55 - protein, 39 aa, Artificial Sequence
  Description of Artificial Sequence: Synthetic polypeptide
RSACVTVKGPLASVGRHSLSKQDCKFLPFWGFLEEFLLC

SEQ ID NO: 56 - protein, 97 aa, Artificial Sequence
  Description of Artificial Sequence: Synthetic polypeptide
IQWGTTTAPRPIRPPFLESKQNCSHFPTPLLASEDRRETGLFLPSAAQKMKKAHFLKTWFRSNPTKTKKARFSTASLAKELTHPLLVSLLLKEKQDG

SEQ ID NO: 57 - protein, 73 aa, Artificial Sequence
  Description of Artificial Sequence: Synthetic polypeptide
PTDPFLGLRLGLHLQKVFHQSHAEYSGAPPPPPAPSGLRFWNPSRIAHISQLLSWPQKTEERLGYSSHQLPRK

SEQ ID NO: 58 - protein, 45 aa, Artificial Sequence
  Description of Artificial Sequence: Synthetic polypeptide
FCCSCCFFGGERWSKSPYCPQRMTPGTTFITMMKKEAEKRTRTLT

SEQ ID NO: 59 - protein, 95 aa, Artificial Sequence
  Description of Artificial Sequence: Synthetic polypeptide
WRRNCKAPVSLRKSVQTPARSSPARPDRTRRLPSLGVPGQPWALGAAASRRCCCCCRSPLGSARSRSPATLALTPRATRSRCPGATWREAASWAE

SEQ ID NO: 60 - protein, 113 aa, Artificial Sequence
  Description of Artificial Sequence: Synthetic polypeptide
PGRPLQTHVLPEPHLALQPLQPHADHAHADAPAIQPVLWTTPPLQHGHRHGLEPCSMLTGPPARVPAVPFDLHFCRSSIMKPKRDGYMFLKAESKIMFATLQRSSLWCLCSNH

SEQ ID NO: 61 - protein, 57 aa, Artificial Sequence
  Description of Artificial Sequence: Synthetic polypeptide
PRPRRCTRHPACPLDHTTPPAWSPPWVRALLDAHRAPSESPCSPFRLAFLQEQYHEA

SEQ ID NO: 62 - protein, 494 aa, Artificial Sequence
  Description of Artificial Sequence: Synthetic polypeptide
TRRCHCCPHLRSHPCPHHLRNHPRPHHLRHHACHHHLRNCPHPHFLRHCTCPGRWRNRPSLRRLRSLLCLPHLNHHLFLHWRSRPCLHRKSHPHLLHLRRLYPHHLKHRPCPHHLKNLLCPRHLRNCPLPRHLKHLACLHHLRSHPCPLHLKSHPCLHHRRHLVCSHHLKSLLCPLHLRSLPFPHHLRHHACPHHLRTRLCPHHLKNHLCPPHLRYRAYPPCLWCHACLHRLRNLPCPHRLRSLPRPLHLRLHASPHHLRTPPHPHHLRTHLLPHHRRTRSCPCRWRSHPCCHYLRSRNSAPGPRGRTCHPGLRSRTCPPGLRSHTYLRRLRSHTCPPSLRSHAYALCLRSHTCPPRLRDHICPLSLRNCTCPPRLRSRTCLLCLRSHACPPNLRNHTCPPSLRSHACPPGLRNRICPLSLRSHPCPLGLKSPLRSQANALHLRSCPCSLPLGNHPYLPCLESQPCLSLGNHLCPLCPRSCRCPHLGSHPCRLS

SEQ ID NO: 63 - protein, 53 aa, Artificial Sequence
  Description of Artificial Sequence: Synthetic polypeptide
SWKGTNWCNDMCIFITSGQIFKGTRGPRFLWGSKDQRQKGSNYSQSEALCVLL

SEQ ID NO: 64 - protein, 9 aa, Artificial Sequence
  Description of Artificial Sequence: Synthetic peptide
KRTKCFTFG

SEQ ID NO: 65 - protein, 27 aa, Artificial Sequence
  Description of Artificial Sequence: Synthetic peptide
PIFIQTLLLWDFLQKDLKAYTGTILMM

SEQ ID NO: 66 - protein, 22 aa, Artificial Sequence
  Description of Artificial Sequence: Synthetic peptide
QKMILTKQIKTKPTDTFLQILR

SEQ ID NO: 67 - protein, 43 aa, Artificial Sequence
  Description of Artificial Sequence: Synthetic polypeptide
GFWIQSIKTITRYTIFVLKDIMTPPNLIAELHNILLKTITHHS

SEQ ID NO: 68 - protein, 40 aa, Artificial Sequence
  Description of Artificial Sequence: Synthetic polypeptide
NYSNVQWRNLQSSVCGLPAKGEDIFLQFRTHTTGRQVHVL

SEQ ID NO: 69 - protein, 44 aa, Artificial Sequence
  Description of Artificial Sequence: Synthetic polypeptide
YQSRVLPQTEQDAKKGQNVSLLGKYILHTRTRGNLRKSRKWKSM

SEQ ID NO: 70 - protein, 85 aa, Artificial Sequence
  Description of Artificial Sequence: Synthetic polypeptide
SSQNARGCSPRGPCTSSSYTGGPCTSPLLAPVIFCPFPENLPGQLRFPSGLLAFWDSQVCDLHVLPCPQQDVLPTGQDLPCAAVG

SEQ ID NO: 71 - protein, 72 aa, Artificial Sequence
  Description of Artificial Sequence: Synthetic polypeptide
GAAPTMSAAQIAMVWPLLSILSEWKEICVWSIWMTETLFDIVWWCPMSRLRLALTVPPSTTTTCVTVPAWAA

SEQ ID NO: 72 - protein, 97 aa, Artificial Sequence
  Description of Artificial Sequence: Synthetic polypeptide
TGGPSSPSSHWKTPVVIYWDGTALRCVFVPVLGETGAQRKRISARKGSLTTSCPQGALSEHCPTTPAPLPSQRRNHWMENISPFRSVGVSASRCSES

SEQ ID NO: 73 - protein, 31 aa, Artificial Sequence
  Description of Artificial Sequence: Synthetic polypeptide
FHTPARHPRPRHGHLQAVTAHDGGCEALPPP

SEQ ID NO: 74 - protein, 78 aa, Artificial Sequence
  Description of Artificial Sequence: Synthetic polypeptide
CCPRTILNNGSLKTQVQMKLPECQRLLPPWPLHQQLLHRRPLHQPPPGPCHLLSLPRKPTRAATVSVWASCILGQPSL

SEQ ID NO: 75 - protein, 28 aa, Artificial Sequence
  Description of Artificial Sequence: Synthetic peptide
VRKHFQTYGNYFLKTTFCPPCRPKQWMI

SEQ ID NO: 76 - protein, 46 aa, Artificial Sequence
  Description of Artificial Sequence: Synthetic polypeptide
LARTPLPSTRCFANWPRPALCSCGLIPHPRPAPASAPWPSTSSHST

SEQ ID NO: 77 - protein, 81 aa, Artificial Sequence
  Description of Artificial Sequence: Synthetic polypeptide
ELQETGHRQVALRRSGRPPKCAERPGAADTGAHCTSTDGRLKISVETYTVSSQLLMVLMSLDLDTGLVPSLVSKCLILRVK

SEQ ID NO: 78 - protein, 10 aa, Artificial Sequence
  Description of Artificial Sequence: Synthetic peptide
KSDASRLSGA

SEQ ID NO: 79 - protein, 29 aa, Artificial Sequence
  Description of Artificial Sequence: Synthetic peptide
RTAYFCQYHTASVYSERAMPPGCPEPSQA

SEQ ID NO: 80 - protein, 91 aa, Artificial Sequence
  Description of Artificial Sequence: Synthetic polypeptide
TRASPPRSSSAIAVRASCCPYGSTSTASRSPTQRCRLARAAASTATEVTFGSSEMQGHTMGFWLTKLNYLCHLSMLTDSLFLPISHCQCIL

SEQ ID NO: 81 - protein, 31 aa, Artificial Sequence
  Description of Artificial Sequence: Synthetic polypeptide
SSLRITGDWTSSGRSTKIWKTTQMCRKTWSG

SEQ ID NO: 82 - protein, 104 aa, Artificial Sequence
  Description of Artificial Sequence: Synthetic polypeptide
RRRRGGVGRRGVRPGRVRPGGTGRRGGDGGRAAAARAALGELARALPGHLLQSQSARRAARMAQLRRRAAALPNAAAWHGPPHPQLPRSPLALQRCRDTRWASG

SEQ ID NO: 83 - protein, 53 aa, Artificial Sequence
  Description of Artificial Sequence: Synthetic polypeptide
GVEPCYGDKDKRRHCFATWKNISGSIEIVKQGCWLDDINCYDRTDCVEKKRQP

SEQ ID NO: 84 - protein, 103 aa, Artificial Sequence
  Description of Artificial Sequence: Synthetic polypeptide
GVEPCYGDKDKRRHCFATWKNISGSIEIVKQGCWLDDINCYDRTDCVEKKTALKYIFVAVRAICVMKSFLIFRRWKSHSPLQIQLHLSHPITTSCSIPWCHLC

SEQ ID NO: 85 - protein, 118 aa, Artificial Sequence
  Description of Artificial Sequence: Synthetic polypeptide
TAEAVNVAIAAPPSEGEANAELCRYLSKVLELRKSDVVLDKVGLALFFFFFETKSCSVAQAGVQWRSLGSLQPPPPGFKLFSCLSFLSSWDYRRMPPCLANFCIFNRDGVSPCWSGWS

SEQ ID NO: 86 - protein, 71 aa, Artificial Sequence
  Description of Artificial Sequence: Synthetic polypeptide
LSVIIFFFVYIWHWALPLILNNHHICLMSSIILDCNSVRQSIMSVCFFFFSVIFSTRCLTDSRYPNICWFK

SEQ ID NO: 87 - protein, 60 aa, Artificial Sequence
  Description of Artificial Sequence: Synthetic polypeptide
LSVIIFFFVYIWHWALPLILNNHHICLMSSIILDCNSVRQSIMSVCFFFFCYILNTMFDR

SEQ ID NO: 88 - protein, 106 aa, Artificial Sequence
  Description of Artificial Sequence: Synthetic polypeptide
VLVLSCDLITDVALHEVVDLFRAYDASLAMLMRKGQDSIEPVPGQKGKKKQWSSVTSLEWTAQERGCSSWLMKQTWMKSWSLRDPSYRSILEYVSTRVLWMPTSTV

SEQ ID NO: 89 - protein, 112 aa, Artificial Sequence
  Description of Artificial Sequence: Synthetic polypeptide
SIQVMRAQMNQIQSVEGQPLARRPRATGRTKRCQPRDVTKKTCNSNDGKKREWEKRKQILGGGGKYKEYFLKRILIRKAMTVLAGDKKGLGRFMRCVQSETKAVSLQLPLGR

SEQ ID NO: 90 - protein, 57 aa, Artificial Sequence
  Description of Artificial Sequence: Synthetic polypeptide
LDFLGEFATDIRTHGVHMVLNHQGRPSGDAFIQMKSADRAFMAAQKCHKKKHEGQIC

SEQ ID NO: 91 - protein, 51 aa, Artificial Sequence
  Description of Artificial Sequence: Synthetic polypeptide
LDFLGEFATDIRTHGVHMVLNHQGRPSGDAFIQMKSADRAFMAAQKCHKKT

SEQ ID NO: 92 - protein, 75 aa, Artificial Sequence
  Description of Artificial Sequence: Synthetic polypeptide
GALCKDGRFRSDIGEFEWKLKEGHKKIYGKQSMVDEVSGKVLEMDISKKKHYNRKISIKKLNRMKVPLMKLITRV

SEQ ID NO: 93 - protein, 58 aa, Artificial Sequence
  Description of Artificial Sequence: Synthetic polypeptide
RERAQLLEEQEKTLTSKLQEQARVLKERCQGESTQLQNEIQKLQKTLKKKPRDICRIS

SEQ ID NO: 94 - protein, 53 aa, Artificial Sequence
  Description of Artificial Sequence: Synthetic polypeptide
VNTLKEGKRLPCPPNCPDEVYQLMRKCWEFQPSNRTSFQNLIEGFEALLKTSN

SEQ ID NO: 95 - protein, 65 aa, Artificial Sequence
  Description of Artificial Sequence: Synthetic polypeptide
CRPVTPSCKELADLMTRCMNYDPNQRPFFRAIMRDINKLEEQNPDIVSEKNQQLKWTPHILKSAS

SEQ ID NO: 96 - protein, 69 aa, Artificial Sequence
  Description of Artificial Sequence: Synthetic polypeptide
DDHDVLSFLTFQLTEPGKEPPTPDKEISEKEKEKYQEEFEHFQQELDKKKRGIPEGPPRPPRAACGGNI

SEQ ID NO: 97 - protein, 71 aa, Artificial Sequence
  Description of Artificial Sequence: Synthetic polypeptide
DDHDVLSFLTFQLTEPGKEPPTPDKEISEKEKEKYQEEFEHFQQELDKKKRNSRRATPTSKGSLRRKYLRV

SEQ ID NO: 98 - protein, 68 aa, Artificial Sequence
  Description of Artificial Sequence: Synthetic polypeptide
TKSTLIGEDVNPLIKLDDAVNVDEIMTDTSTSYLLCISENKENVRDKKKGQHFYWHCGSAACHRRGCV

SEQ ID NO: 99 - protein, 81 aa, Artificial Sequence
  Description of Artificial Sequence: Synthetic polypeptide
LYTKSTLIGEDVNPLIKLDDAVNVDEIMTDTSTSYLLCISENKENVRDKKRATFLLALWECSLPQARLCLIVSRTLLLVQS

SEQ ID NO: 100 - protein, 58 aa, Artificial Sequence
  Description of Artificial Sequence: Synthetic polypeptide
LPPPKLTDPRLLYIGFLGYCSGLIDNLIRRRPIATAGLHRQLLYITAFFFCWILSCKT

SEQ ID NO: 101 - protein, 56 aa, Artificial Sequence
  Description of Artificial Sequence: Synthetic polypeptide
SLPPPKLTDPRLLYIGFLGYCSGLIDNLIRRRPIATAGLHRQLLYITAFFLLDIIL

SEQ ID NO: 102 - protein, 112 aa, Artificial Sequence
  Description of Artificial Sequence: Synthetic polypeptide
NQSGGAGEDCQIFSTPGHPKMIYSSSNLKTPSKLCSGSKSHDVQEVLKKKTGSNEVTTRYEEKKTGSVRKANRMPKDVNIQVRKKQKHETRRKSKYNEDFERAWREDLTIKR

SEQ ID NO: 103 - protein, 23 aa, Artificial Sequence
  Description of Artificial Sequence: Synthetic peptide
MAPVKKLVVKGGKKKEASSEVHS

SEQ ID NO: 104 - protein, 18 aa, Artificial Sequence
  Description of Artificial Sequence: Synthetic peptide
MAPVKKLVVKGGKKRSKF

SEQ ID NO: 105 - protein, 51 aa, Artificial Sequence
  Description of Artificial Sequence: Synthetic polypeptide
MPSHQGAEQQQQQHHVFISQVVTEKEFLSRSDQLQQAVQSQGFINYCQKKN

SEQ ID NO: 106 - protein, 65 aa, Artificial Sequence
  Description of Artificial Sequence: Synthetic polypeptide
MPSHQGAEQQQQQHHVFISQVVTEKEFLSRSDQLQQAVQSQGFINYCQKKLMLLRLNLRKMCGPF

SEQ ID NO: 107 - protein, 79 aa, Artificial Sequence
  Description of Artificial Sequence: Synthetic polypeptide
AEVFEKEQSICAAEEQPAEDGQGETNKNRTKGGWQQKSKGPKKTAKSKKKETFKKKTYTCAITTVKATETKAGKWSRWE

SEQ ID NO: 108 - protein, 53 aa, Artificial Sequence
  Description of Artificial Sequence: Synthetic polypeptide
MAEVFEKEQSICAAEEQPAEDGQGETNKNRTKGGWQQKSKGPKKTAKSKKRNL

SEQ ID NO: 109 - protein, 71 aa, Artificial Sequence
  Description of Artificial Sequence: Synthetic polypeptide
NIMEIRQLPSSHALEAKLSRMSYPVKEQESILKTVGKLTATQVAKISFFFALCGFWQICHIKKHFQTHKLL

SEQ ID NO: 110 - protein, 68 aa, Artificial Sequence
  Description of Artificial Sequence: Synthetic polypeptide
YEKKKYYDKNAIAITNISSSDAPLQPLVSSPSLQAAVDKNKLEKEKEKKKGREKERKGARKAGKTTYS

SEQ ID NO: 111 - protein, 97 aa, Artificial Sequence
  Description of Artificial Sequence: Synthetic polypeptide
KYEKKKYYDKNAIAITNISSSDAPLQPLVSSPSLQAAVDKNKLEKEKEKKRKRKREKRSQKSRQNHLQLKSCRRKISNWSLKKVPALKKLRSPLWIF

SEQ ID NO: 112 - protein, 65 aa, Artificial Sequence
  Description of Artificial Sequence: Synthetic polypeptide
IYQDAYRAEWQVYKEEISRFKEQLTPSQIMSLEKEIMDKHLKRKAMTKKKRVNTAWKTKKTSFSL

SEQ ID NO: 113 - protein, 51 aa, Artificial Sequence
  Description of Artificial Sequence: Synthetic polypeptide
IYQDAYRAEWQVYKEEISRFKEQLTPSQIMSLEKEIMDKHLKRKAMTKKKS

SEQ ID NO: 114 - protein, 52 aa, Artificial Sequence
  Description of Artificial Sequence: Synthetic polypeptide
KPQEVCVAVWRKNDENITLETVCHDPKLPYHDFILEDAASPKCIMKEKKKAW

SEQ ID NO: 115 - protein, 84 aa, Artificial Sequence
  Description of Artificial Sequence: Synthetic polypeptide
EKPQEVCVAVWRKNDENITLETVCHDPKLPYHDFILEDAASPKCIMKEKKSLVRLSSCVPVALMSAMTTSSSQKNITPAILTCC

SEQ ID NO: 116 - protein, 74 aa, Artificial Sequence
  Description of Artificial Sequence: Synthetic polypeptide
VPSKYQFLCSDHFTPDSLDIRWGIRYLKQTAVPTIFSLPEDNQGKDPSKKNPRRKTWKMRKKYAQKPSQKNHLY

SEQ ID NO: 117 - protein, 88 aa, Artificial Sequence
  Description of Artificial Sequence: Synthetic polypeptide
GTTEEMKYVLGQLVGLNSPNSILKAAKTLYEHYSGGESHNSSSSKTFEKKGEKNDLQLFVMSDTTYKIYWTVILLNPCGNLHLKTTSL

SEQ ID NO: 118 - protein, 55 aa, Artificial Sequence
  Description of Artificial Sequence: Synthetic polypeptide
QQLIRETLISWLQAQMLNPQPEKTFIRNKAAQVFALLFVTEYLTKWPKFFLTFSQ

SEQ ID NO: 119 - protein, 100 aa, Artificial Sequence
  Description of Artificial Sequence: Synthetic polypeptide
ERAEWRENIREQQKKCFRSFSLTSVELQMLTNSCVKLQTVHSIPLTINKEEALQRPVASDFEPQGLSEAARWNSKENLLAGPSENDPNLFVALYDFVASG

SEQ ID NO: 120 - protein, 101 aa, Artificial Sequence
  Description of Artificial Sequence: Synthetic polypeptide
ELQMLTNSCVKLQTVHSIPLTINKEDDESPGLYGFLNVIVHSATGFKQSSKALQRPVASDFEPQGLSEAARWNSKENLLAGPSENDPNLFVALYDFVASGD

SEQ ID NO: 121 - protein, 101 aa, Artificial Sequence
  Description of Artificial Sequence: Synthetic polypeptide
ISNSWDAHLGLGACGEAEGLGVQGAEEEEEEEEEEEEEGAGVPACPPKGPELFPLIFPAEPAQASGPYVEIIEQPKQRGMRFRYKCEGRSAGSIPGERSTD

SEQ ID NO: 122 - protein, 100 aa, Artificial Sequence
  Description of Artificial Sequence: Synthetic polypeptide
LQRLDGMGCLEFDEERAQQEDALAQQAFEEARRRTREFEDRDRSHREEMEVHELEKSKRALETQMEEMKTQLEELEDELQATEDAKLRLEVNMQALKGQF

SEQ ID NO: 123 - protein, 100 aa, Artificial Sequence
  Description of Artificial Sequence: Synthetic polypeptide
KGSFPENLRHLKNTMETIDWKVFESWMHHWLLFEMSRHSLEQKPTDAPPKAGVPNKPGIPKLLEGSKNSIQWEKAEDNGCRITYYILEIRKSTSNNLQNQ

SEQ ID NO: 124 - protein, 100 aa, Artificial Sequence
  Description of Artificial Sequence: Synthetic polypeptide
LPQPPICTIDVYMIMVKCWMIDADSRPKFRELIIEFSKMARDPQRYLVIQLQDKFEHLKMIQQEEIRKLEEEKKQLEGEIIDFYKMKAASEALQTQLSTD

SEQ ID NO: 125 - protein, 80 aa, Artificial Sequence
  Description of Artificial Sequence: Synthetic polypeptide
MRPSGTAGAALLALLAALCPASRALEEKKGNYVVTDHGSCVRACGADSYEMEEDGVRKCKKCEGPCRKVCNGIGIGEFKD

SEQ ID NO: 126 - protein, 101 aa, Artificial Sequence
  Description of Artificial Sequence: Synthetic polypeptide
SWENSDDSRNKLSKIPSTPKLIPKVTKTADKHKDVIINQAKMSTREKNSQVYRRKHQELQAMQMELQSPEYKLSKLRTSTIMTDYNPNYCFAGKTSSISDL

SEQ ID NO: 127 - protein, 100 aa, Artificial Sequence
  Description of Artificial Sequence: Synthetic polypeptide
EGHRMDKPANCTHDLYMIMRECWHAAPSQRPTFKQLVEDLDRVLTVTSTDVKATQEENRELRSRCEELHGKNLELGKIMDRFEEVVYQAMEEVQKQKELS

SEQ ID NO: 128 - protein, 107 aa, Artificial Sequence
  Description of Artificial Sequence: Synthetic polypeptide
RDNTLLLRRVELFSLSRQVARESTYLSSLKGSRLHPEELGGPPLKKLKQEATSKSQIMSLWGLVSKMPPEKVQRLYVDFPQHLRHLLGDWLESQPWEFLVGSDAFCC

SEQ ID NO: 129 - protein, 83 aa, Artificial Sequence
  Description of Artificial Sequence: Synthetic polypeptide
MSREMQDVDLAEVKPLVEKGETITGLLQEFDVQEALSVVSEDQSLFECAYGTPHLAKTEMTASSSSDYGQTSKMSPRVPQQDW

SEQ ID NO: 130 - protein, 55 aa, Artificial Sequence
  Description of Artificial Sequence: Synthetic polypeptide
MALNSEALSVVSEDQSLFECAYGTPHLAKTEMTASSSSDYGQTSKMSPRVPQQDW

SEQ ID NO: 131 - protein, 101 aa, Artificial Sequence
  Description of Artificial Sequence: Synthetic polypeptide
VLDMHGFLRQALCRLRQEEPQSLQAAVRTDGFDEFKVRLQDLSSCITQGKAIETQSSSSEEIVPSPPSPPPLPRIYKPCFVCQDKSSGYHYGVSACEGCKG

SEQ ID NO: 132 - protein, 101 aa, Artificial Sequence
  Description of Artificial Sequence: Synthetic polypeptide
RSSPEQPRPSTSKAVSPPHLDGPPSPRSPVIGSEVFLPNSNHVASGAGEAAIETQSSSSEEIVPSPPSPPPLPRIYKPCFVCQDKSSGYHYGVSACEGCKG

SEQ ID NO: 133 - protein, 101 aa, Artificial Sequence
  Description of Artificial Sequence: Synthetic polypeptide
VARFNDLRFVGRSGRGKSFTLTITVFTNPPQVATYHRAIKITVDGPREPRNRTEKHSTMPDSPVDVKTQSRLTPPTMPPPPTTQGAPRTSSFTPTTLTNGT

SEQ ID NO: 134 - protein, 66 aa, Artificial Sequence
  Description of Artificial Sequence: Synthetic polypeptide
SCKVFFKRAAEGKQKYLCASRNDCTIDKFRRKNCPSCRLRKCYEAGMTLGEKFRVGNCKHLKMTRP

SEQ ID NO: 135 - protein, 49 aa, Artificial Sequence
  Description of Artificial Sequence: Synthetic polypeptide
MAGAPPPASLPPCSLISDCCASNQRDSVGVGPSEPGNNIKICNESASRK

SEQ ID NO: 136 - protein, 60 aa, Artificial Sequence
  Description of Artificial Sequence: Synthetic polypeptide
HGWRPFLPVRARSRWNRRLDVTVANGRSWKYGWSLLRVPQVNGIQVLNVSLKSSSNVISY

SEQ ID NO: 137 - protein, 65 aa, Artificial Sequence
  Description of Artificial Sequence: Synthetic polypeptide
RLKEVFQTKIQEFRKACYTLTGYQIDITTENQYRLTSLYAEHPGDCLIFKLRVPGSSVLVTVPGL

SEQ ID NO: 138 - protein, 107 aa, Artificial Sequence
  Description of Artificial Sequence: Synthetic polypeptide
AEVLKVIRQSAGQKTTCGQGLEGPWERPPPLDESERDGGSEDQVEDPALSALLLRPRPPRPEVGAHQDEQAAQGADPRLGAQPACRGLPGLLTVPQPEPLLAPPSAA

SEQ ID NO: 139 - protein, 101 aa, Artificial Sequence; identical to SEQ ID NO: 21
  Description of Artificial Sequence: Synthetic polypeptide

SEQ ID NO: 140 - protein, 9 aa, Artificial Sequence
  Description of Artificial Sequence: Synthetic peptide
ALNSEALSV

SEQ ID NO: 141 - protein, 10 aa, Artificial Sequence
  Description of Artificial Sequence: Synthetic peptide
SMLTGPPARV

SEQ ID NO: 142 - protein, 9 aa, Artificial Sequence
  Description of Artificial Sequence: Synthetic peptide
LLCVWVSSI

SEQ ID NO: 143 - protein, 10 aa, Artificial Sequence
  Description of Artificial Sequence: Synthetic peptide
KLVVVGACGV

SEQ ID NO: 144 - protein, 10 aa, Artificial Sequence
  Description of Artificial Sequence: Synthetic peptide
DFGLATEKSR

SEQ ID NO: 145 - protein, 10 aa, Artificial Sequence
  Description of Artificial Sequence: Synthetic peptide
FGLATEKSRW

SEQ ID NO: 146 - protein, 9 aa, Artificial Sequence
  Description of Artificial Sequence: Synthetic peptide
EAVSGPPPA

SEQ ID NO: 147 - protein, 9 aa, Artificial Sequence
  Description of Artificial Sequence: Synthetic peptide
FEAVSGPPP

SEQ ID NO: 148 - protein, 10 aa, Artificial Sequence
  Description of Artificial Sequence: Synthetic peptide
FEAVSGPPPA

SEQ ID NO: 149 - protein, 102 aa, Artificial Sequence
  Description of Artificial Sequence: Synthetic polypeptide
MSLNITSLGLRSLKEISDGDVIISGNKNLCYANTINWKKLFGTSGQKTKIIRNRGENSCKATGQVCHALCSPEGCWGPEPRDCVSCRNVSRGRECVDKCNLL

SEQ ID NO: 150 - protein, 23 aa, Artificial Sequence
  Description of Artificial Sequence: Synthetic peptide
EFSTLPLPNLRMVRGTQVYDGKF

SEQ ID NO: 151 - protein, 9 aa, Artificial Sequence
  Description of Artificial Sequence: Synthetic peptide
RMVRGTQVY

SEQ ID NO: 152 - protein, 9 aa, Artificial Sequence
  Description of Artificial Sequence: Synthetic peptide
LPLPNLRMV

SEQ ID NO: 153 - protein, 9 aa, Artificial Sequence
  Description of Artificial Sequence: Synthetic peptide
LRMVRGTQV

SEQ ID NO: 154 - protein, 10 aa, Artificial Sequence
  Description of Artificial Sequence: Synthetic peptide
TLPLPNLRMV

SEQ ID NO: 155 - protein, 10 aa, Artificial Sequence
  Description of Artificial Sequence: Synthetic peptide
NLRMVRGTQV

SEQ ID NO: 156 - protein, 10 aa, Artificial Sequence
  Description of Artificial Sequence: Synthetic peptide
LRMVRGTQVY

SEQ ID NO: 157 - protein, 9 aa, Artificial Sequence
  Description of Artificial Sequence: Synthetic peptide
DVLERCPHR

SEQ ID NO: 158 - protein, 9 aa, Artificial Sequence
  Description of Artificial Sequence: Synthetic peptide
LERCPHRPI

SEQ ID NO: 159 - protein, 9 aa, Artificial Sequence
  Description of Artificial Sequence: Synthetic peptide
CPHRPILQA

SEQ ID NO: 160 - protein, 10 aa, Artificial Sequence
  Description of Artificial Sequence: Synthetic peptide
LERCPHRPIL

SEQ ID NO: 161 - protein, 9 aa, Artificial Sequence
  Description of Artificial Sequence: Synthetic peptide
SASNSCFIR

SEQ ID NO: 162 - protein, 9 aa, Artificial Sequence
  Description of Artificial Sequence: Synthetic peptide
LSASNSCFI

SEQ ID NO: 163 - protein, 9 aa, Artificial Sequence
  Description of Artificial Sequence: Synthetic peptide
ALSASNSCF

SEQ ID NO: 164 - protein, 10 aa, Artificial Sequence
  Description of Artificial Sequence: Synthetic peptide
FQNGKMALSA

SEQ ID NO: 165 - protein, 9 aa, Artificial Sequence
  Description of Artificial Sequence: Synthetic peptide
PIIIGHHAY

SEQ ID NO: 166 - protein, 9 aa, Artificial Sequence
  Description of Artificial Sequence: Synthetic peptide
GHHAYGDQY

SEQ ID NO: 167 - protein, 10 aa, Artificial Sequence
  Description of Artificial Sequence: Synthetic peptide
KPIIIGHHAY

SEQ ID NO: 168 - protein, 10 aa, Artificial Sequence
  Description of Artificial Sequence: Synthetic peptide
IGHHAYGDQY

SEQ ID NO: 169 - protein, 9 aa, Artificial Sequence
  Description of Artificial Sequence: Synthetic peptide
PIIIGCHAY

SEQ ID NO: 170 - protein, 9 aa, Artificial Sequence
  Description of Artificial Sequence: Synthetic peptide
GCHAYGDQY

SEQ ID NO: 171 - protein, 10 aa, Artificial Sequence
  Description of Artificial Sequence: Synthetic peptide
KPIIIGCHAY

SEQ ID NO: 172 - protein, 10 aa, Artificial Sequence
  Description of Artificial Sequence: Synthetic peptide
IGCHAYGDQY

SEQ ID NO: 173 - protein, 9 aa, Artificial Sequence
  Description of Artificial Sequence: Synthetic peptide
PIIIGGHAY

SEQ ID NO: 174 - protein, 9 aa, Artificial Sequence
  Description of Artificial Sequence: Synthetic peptide
GGHAYGDQY

SEQ ID NO: 175 - protein, 10 aa, Artificial Sequence
  Description of Artificial Sequence: Synthetic peptide
KPIIIGGHAY

SEQ ID NO: 176 - protein, 10 aa, Artificial Sequence
  Description of Artificial Sequence: Synthetic peptide
IGGHAYGDQY

SEQ ID NO: 177 - protein, 9 aa, Artificial Sequence
  Description of Artificial Sequence: Synthetic peptide
ISTRDPLSK

SEQ ID NO: 178 - protein, 9 aa, Artificial Sequence
  Description of Artificial Sequence: Synthetic peptide
STRDPLSKI

SEQ ID NO: 179 - protein, 9 aa, Artificial Sequence
  Description of Artificial Sequence: Synthetic peptide
LSKITEQEK

SEQ ID NO: 180 - protein, 10 aa, Artificial Sequence
  Description of Artificial Sequence: Synthetic peptide
AISTRDPLSK

SEQ ID NO: 181 - protein, 10 aa, Artificial Sequence
  Description of Artificial Sequence: Synthetic peptide
SKITEQEKDF

SEQ ID NO: 182 - protein, 10 aa, Artificial Sequence
  Description of Artificial Sequence: Synthetic peptide
SEITKQEKDF

SEQ ID NO: 183 - protein, 10 aa, Artificial Sequence
  Description of Artificial Sequence: Synthetic peptide
KQEKDFLWSH

SEQ ID NO: 184 - protein, 9 aa, Artificial Sequence
  Description of Artificial Sequence: Synthetic peptide
FMKQMNDAR

SEQ ID NO: 185 - protein, 9 aa, Artificial Sequence
  Description of Artificial Sequence: Synthetic peptide
KQMNDARHG

SEQ ID NO: 186 - protein, 9 aa, Artificial Sequence
  Description of Artificial Sequence: Synthetic peptide
RHGGWTTKM

SEQ ID NO: 187 - protein, 10 aa, Artificial Sequence
  Description of Artificial Sequence: Synthetic peptide
YFMKQMNDAR

SEQ ID NO: 188 - protein, 10 aa, Artificial Sequence
  Description of Artificial Sequence: Synthetic peptide
FMKQMNDARH

SEQ ID NO: 189 - protein, 10 aa, Artificial Sequence
  Description of Artificial Sequence: Synthetic peptide
KQMNDARHGG

SEQ ID NO: 190 - protein, 10 aa, Artificial Sequence
  Description of Artificial Sequence: Synthetic peptide
QMNDARHGGW

SEQ ID NO: 191 - protein, 10 aa, Artificial Sequence
  Description of Artificial Sequence: Synthetic peptide
ARHGGWTTKM

SEQ ID NO: 192 - protein, 9 aa, Artificial Sequence
  Description of Artificial Sequence: Synthetic peptide
TTKLPLKFR

SEQ ID NO: 193 - protein, 9 aa, Artificial Sequence
  Description of Artificial Sequence: Synthetic peptide
RDAETDQIM

SEQ ID NO: 194 - protein, 10 aa, Artificial Sequence
  Description of Artificial Sequence: Synthetic peptide
KFRDAETDQI

SEQ ID NO: 195 - protein, 10 aa, Artificial Sequence
  Description of Artificial Sequence: Synthetic peptide
ETTKLPLKFR

SEQ ID NO: 196 - protein, 10 aa, Artificial Sequence
  Description of Artificial Sequence: Synthetic peptide
RDAETDQIMM

SEQ ID NO: 197 - protein, 9 aa, Artificial Sequence
  Description of Artificial Sequence: Synthetic peptide
QTGVMICAY

SEQ ID NO: 198 - protein, 9 aa, Artificial Sequence
  Description of Artificial Sequence: Synthetic peptide
GKGQTGVMI

SEQ ID NO: 199 - protein, 10 aa, Artificial Sequence
  Description of Artificial Sequence: Synthetic peptide
GQTGVMICAY

SEQ ID NO: 200 - protein, 10 aa, Artificial Sequence
  Description of Artificial Sequence: Synthetic peptide
KAGKGQTGVM

SEQ ID NO: 201 - protein, 9 aa, Artificial Sequence
  Description of Artificial Sequence: Synthetic peptide
TTNAFSGEY

SEQ ID NO: 202 - protein, 9 aa, Artificial Sequence
  Description of Artificial Sequence: Synthetic peptide
FSGEYIPTV

SEQ ID NO: 203 - protein, 9 aa, Artificial Sequence
  Description of Artificial Sequence: Synthetic peptide
SGEYIPTVF

SEQ ID NO: 204 - protein, 10 aa, Artificial Sequence
  Description of Artificial Sequence: Synthetic peptide
YTTNAFSGEY

SEQ ID NO: 205 - protein, 10 aa, Artificial Sequence
  Description of Artificial Sequence: Synthetic peptide
TTNAFSGEYI

SEQ ID NO: 206 - protein, 10 aa, Artificial Sequence
  Description of Artificial Sequence: Synthetic peptide
FSGEYIPTVF

SEQ ID NO: 207 - protein, 9 aa, Artificial Sequence
  Description of Artificial Sequence: Synthetic peptide
SSCMGSMNR

SEQ ID NO: 208 - protein, 9 aa, Artificial Sequence
  Description of Artificial Sequence: Synthetic peptide
GSMNRRPIL

SEQ ID NO: 209 - protein, 9 aa, Artificial Sequence
  Description of Artificial Sequence: Synthetic peptide
MGSMNRRPI

SEQ ID NO: 210 - protein, 9 aa, Artificial Sequence
  Description of Artificial Sequence: Synthetic peptide
CNSSCMGSM

SEQ ID NO: 211 - protein, 10 aa, Artificial Sequence
  Description of Artificial Sequence: Synthetic peptide
SMNRRPILTI

SEQ ID NO: 212 - protein, 10 aa, Artificial Sequence
  Description of Artificial Sequence: Synthetic peptide
SSCMGSMNRR

SEQ ID NO: 213 - protein, 10 aa, Artificial Sequence
  Description of Artificial Sequence: Synthetic peptide
NSSCMGSMNR

SEQ ID NO: 214 - protein, 10 aa, Artificial Sequence
  Description of Artificial Sequence: Synthetic peptide
MGSMNRRPIL

SEQ ID NO: 215 - protein, 10 aa, Artificial Sequence
  Description of Artificial Sequence: Synthetic peptide
MCNSSCMGSM

SEQ ID NO: 216 - protein, 10 aa, Artificial Sequence
  Description of Artificial Sequence: Synthetic peptide
CMGSMNRRPI

SEQ ID NO: 217 - protein, 9 aa, Artificial Sequence
  Description of Artificial Sequence: Synthetic peptide
TEVVRHCPH

SEQ ID NO: 218 - protein, 10 aa, Artificial Sequence
  Description of Artificial Sequence: Synthetic peptide
VVRHCPHHER

SEQ ID NO: 219 - protein, 10 aa, Artificial Sequence
  Description of Artificial Sequence: Synthetic peptide
SQHMTEVVRH

SEQ ID NO: 220 - protein, 9 aa, Artificial Sequence
  Description of Artificial Sequence: Synthetic peptide
MNQRPILTI

SEQ ID NO: 221 - protein, 9 aa, Artificial Sequence
  Description of Artificial Sequence: Synthetic peptide
NQRPILTII

SEQ ID NO: 222 - protein, 10 aa, Artificial Sequence
  Description of Artificial Sequence: Synthetic peptide
CMGGMNQRPI

SEQ ID NO: 223 - protein, 10 aa, Artificial Sequence
  Description of Artificial Sequence: Synthetic peptide
GMNQRPILTI

SEQ ID NO: 224 - protein, 10 aa, Artificial Sequence
  Description of Artificial Sequence: Synthetic peptide
SSCMGGMNQR

SEQ ID NO: 225 - protein, 10 aa, Artificial Sequence
  Description of Artificial Sequence: Synthetic peptide
NQRPILTIIT

SEQ ID NO: 226 - protein, 9 aa, Artificial Sequence
  Description of Artificial Sequence: Synthetic peptide
NWRPILTII

SEQ ID NO: 227 - protein, 9 aa, Artificial Sequence
  Description of Artificial Sequence: Synthetic peptide
SSCMGGMNW

SEQ ID NO: 228 - protein, 9 aa, Artificial Sequence
  Description of Artificial Sequence: Synthetic peptide
MGGMNWRPI

SEQ ID NO: 229 - protein, 9 aa, Artificial Sequence
  Description of Artificial Sequence: Synthetic peptide
MNWRPILTI

SEQ ID NO: 230 - protein, 10 aa, Artificial Sequence
  Description of Artificial Sequence: Synthetic peptide
CMGGMNWRPI

SEQ ID NO: 231 - protein, 10 aa, Artificial Sequence
  Description of Artificial Sequence: Synthetic peptide
GMNWRPILTI

SEQ ID NO: 232 - protein, 10 aa, Artificial Sequence
  Description of Artificial Sequence: Synthetic peptide
SSCMGGMNWR

SEQ ID NO: 233 - protein, 10 aa, Artificial Sequence
  Description of Artificial Sequence: Synthetic peptide
MNWRPILTII

SEQ ID NO: 234 - protein, 10 aa, Artificial Sequence
  Description of Artificial Sequence: Synthetic peptide
NSSCMGGMNW

SEQ ID NO: 235 - protein, 9 aa, Artificial Sequence
  Description of Artificial Sequence: Synthetic peptide
NSFEVCVCA

SEQ ID NO: 236 - protein, 10 aa, Artificial Sequence
  Description of Artificial Sequence: Synthetic peptide
EVCVCACPGR

SEQ ID NO: 237 - protein, 10 aa, Artificial Sequence
  Description of Artificial Sequence: Synthetic peptide
FEVCVCACPG

SEQ ID NO: 238 - protein, 9 aa, Artificial Sequence
  Description of Artificial Sequence: Synthetic peptide
KLNRMKVPL

SEQ ID NO: 239 - protein, 9 aa, Artificial Sequence
  Description of Artificial Sequence: Synthetic peptide
PLMKLITRV

SEQ ID NO: 240 - protein, 9 aa, Artificial Sequence
  Description of Artificial Sequence: Synthetic peptide
RMKVPLMKL

SEQ ID NO: 241 - protein, 9 aa, Artificial Sequence
  Description of Artificial Sequence: Synthetic peptide
ISKKKHYNR

SEQ ID NO: 242 - protein, 9 aa, Artificial Sequence
  Description of Artificial Sequence: Synthetic peptide
SKKKHYNRK

SEQ ID NO: 243 - protein, 9 aa, Artificial Sequence
  Description of Artificial Sequence: Synthetic peptide
KHYNRKISI

SEQ ID NO: 244 - protein, 9 aa, Artificial Sequence
  Description of Artificial Sequence: Synthetic peptide
HYNRKISIK

SEQ ID NO: 245 - protein, 9 aa, Artificial Sequence
  Description of Artificial Sequence: Synthetic peptide
YNRKISIKK

SEQ ID NO: 246 - protein, 9 aa, Artificial Sequence
  Description of Artificial Sequence: Synthetic peptide
KISIKKLNR

SEQ ID NO: 247 - protein, 9 aa, Artificial Sequence
  Description of Artificial Sequence: Synthetic peptide
SIKKLNRMK

SEQ ID NO: 248 - protein, 9 aa, Artificial Sequence
  Description of Artificial Sequence: Synthetic peptide
LNRMKVPLM

SEQ ID NO: 249 - protein, 9 aa, Artificial Sequence
  Description of Artificial Sequence: Synthetic peptide
ISIKKLNRM

SEQ ID NO: 250 - protein, 9 aa, Artificial Sequence
  Description of Artificial Sequence: Synthetic peptide
MKVPLMKLI

SEQ ID NO: 251 - protein, 10 aa, Artificial Sequence
  Description of Artificial Sequence: Synthetic peptide
KLNRMKVPLM

SEQ ID NO: 252 - protein, 10 aa, Artificial Sequence
  Description of Artificial Sequence: Synthetic peptide
RMKVPLMKLI

SEQ ID NO: 253 - protein, 10 aa, Artificial Sequence
  Description of Artificial Sequence: Synthetic peptide
ISIKKLNRMK

SEQ ID NO: 254 - protein, 10 aa, Artificial Sequence
  Description of Artificial Sequence: Synthetic peptide
ISKKKHYNRK

SEQ ID NO: 255 - protein, 10 aa, Artificial Sequence
  Description of Artificial Sequence: Synthetic peptide
KHYNRKISIK

SEQ ID NO: 256 - protein, 10 aa, Artificial Sequence
  Description of Artificial Sequence: Synthetic peptide
HYNRKISIKK

SEQ ID NO: 257 - protein, 10 aa, Artificial Sequence
  Description of Artificial Sequence: Synthetic peptide
KISIKKLNRM

SEQ ID NO: 258 - protein, 10 aa, Artificial Sequence
  Description of Artificial Sequence: Synthetic peptide
SIKKLNRMKV

SEQ ID NO: 259 - protein, 10 aa, Artificial Sequence
  Description of Artificial Sequence: Synthetic peptide
LNRMKVPLMK

SEQ ID NO: 260 - protein, 10 aa, Artificial Sequence
  Description of Artificial Sequence: Synthetic peptide
KVPLMKLITR

SEQ ID NO: 261 - protein, 10 aa, Artificial Sequence
  Description of Artificial Sequence: Synthetic peptide
DISKKKHYNR

SEQ ID NO: 262 - protein, 10 aa, Artificial Sequence
  Description of Artificial Sequence: Synthetic peptide
KKHYNRKISI

SEQ ID NO: 263 - protein, 10 aa, Artificial Sequence
  Description of Artificial Sequence: Synthetic peptide
KKLNRMKVPL

SEQ ID NO: 264 - protein, 10 aa, Artificial Sequence
  Description of Artificial Sequence: Synthetic peptide
VPLMKLITRV

SEQ ID NO: 265 - protein, 10 aa, Artificial Sequence
  Description of Artificial Sequence: Synthetic peptide
VVKGGKKRSK

SEQ ID NO: 266 - protein, 9 aa, Artificial Sequence
  Description of Artificial Sequence: Synthetic peptide
VKGGKKRSK

SEQ ID NO: 267 - protein, 9 aa, Artificial Sequence
  Description of Artificial Sequence: Synthetic peptide
ALKKLRSPL

SEQ ID NO: 268 - protein, 9 aa, Artificial Sequence
  Description of Artificial Sequence: Synthetic peptide
KISNWSLKK

SEQ ID NO: 269 - protein, 9 aa, Artificial Sequence
  Description of Artificial Sequence: Synthetic peptide
SLKKVPALK

SEQ ID NO: 270 - protein, 9 aa, Artificial Sequence
  Description of Artificial Sequence: Synthetic peptide
KLRSPLWIF

SEQ ID NO: 271 - protein, 9 aa, Artificial Sequence
  Description of Artificial Sequence: Synthetic peptide
KKRKRKREK

SEQ ID NO: 272 - protein, 9 aa, Artificial Sequence
  Description of Artificial Sequence: Synthetic peptide
RKREKRSQK

SEQ ID NO: 273 - protein, 9 aa, Artificial Sequence
  Description of Artificial Sequence: Synthetic peptide
RSQKSRQNH

SEQ ID NO: 274 - protein, 9 aa, Artificial Sequence
  Description of Artificial Sequence: Synthetic peptide
SQKSRQNHL

SEQ ID NO: 275 - protein, 9 aa, Artificial Sequence
  Description of Artificial Sequence: Synthetic peptide
KSRQNHLQL

SEQ ID NO: 276 - protein, 9 aa, Artificial Sequence
  Description of Artificial Sequence: Synthetic peptide
RRKISNWSL

SEQ ID NO: 277 - protein, 9 aa, Artificial Sequence
  Description of Artificial Sequence: Synthetic peptide
RKISNWSLK

SEQ ID NO: 278 - protein, 9 aa, Artificial Sequence
  Description of Artificial Sequence: Synthetic peptide
KVPALKKLR

SEQ ID NO: 279 - protein, 9 aa, Artificial Sequence
  Description of Artificial Sequence: Synthetic peptide
HLQLKSCRR

SEQ ID NO: 280 - protein, 9 aa, Artificial Sequence
  Description of Artificial Sequence: Synthetic peptide
WSLKKVPAL

SEQ ID NO: 281 - protein, 9 aa, Artificial Sequence
  Description of Artificial Sequence: Synthetic peptide
RQNHLQLKS

SEQ ID NO: 282 - protein, 9 aa, Artificial Sequence
  Description of Artificial Sequence: Synthetic peptide
KKVPALKKL

SEQ ID NO: 283 - protein, 9 aa, Artificial Sequence
  Description of Artificial Sequence: Synthetic peptide
LKKLRSPLW

SEQ ID NO: 284 - protein, 9 aa, Artificial Sequence
  Description of Artificial Sequence: Synthetic peptide
KKLRSPLWI

SEQ ID NO: 285 - protein, 10 aa, Artificial Sequence
  Description of Artificial Sequence: Synthetic peptide
KISNWSLKKV

SEQ ID NO: 286 - protein, 10 aa, Artificial Sequence
  Description of Artificial Sequence: Synthetic peptide
KSRQNHLQLK

SEQ ID NO: 287 - protein, 10 aa, Artificial Sequence
  Description of Artificial Sequence: Synthetic peptide
SLKKVPALKK

SEQ ID NO: 288 - protein, 10 aa, Artificial Sequence
  Description of Artificial Sequence: Synthetic peptide
WSLKKVPALK

SEQ ID NO: 289 - protein, 10 aa, Artificial Sequence
  Description of Artificial Sequence: Synthetic peptide
KRKREKRSQK

SEQ ID NO: 290 - protein, 10 aa, Artificial Sequence
  Description of Artificial Sequence: Synthetic peptide
RSQKSRQNHL

SEQ ID NO: 291 - protein, 10 aa, Artificial Sequence
  Description of Artificial Sequence: Synthetic peptide
HLQLKSCRRK

SEQ ID NO: 292 - protein, 10 aa, Artificial Sequence
  Description of Artificial Sequence: Synthetic peptide
RRKISNWSLK

SEQ ID NO: 293 - protein, 10 aa, Artificial Sequence
  Description of Artificial Sequence: Synthetic peptide
CRRKISNWSL

SEQ ID NO: 294 - protein, 10 aa, Artificial Sequence
  Description of Artificial Sequence: Synthetic peptide
NWSLKKVPAL

SEQ ID NO: 295 - protein, 10 aa, Artificial Sequence
  Description of Artificial Sequence: Synthetic peptide
QKSRQNHLQL

SEQ ID NO: 296 - protein, 10 aa, Artificial Sequence
  Description of Artificial Sequence: Synthetic peptide
RQNHLQLKSC

SEQ ID NO: 297 - protein, 10 aa, Artificial Sequence
  Description of Artificial Sequence: Synthetic peptide
LQLKSCRRKI

SEQ ID NO: 298 - protein, 10 aa, Artificial Sequence
  Description of Artificial Sequence: Synthetic peptide
ALKKLRSPLW

SEQ ID NO: 299 - protein, 9 aa, Artificial Sequence
  Description of Artificial Sequence: Synthetic peptide
ADVLLSVHL

SEQ ID NO: 300 - protein, 10 aa, Artificial Sequence
  Description of Artificial Sequence: Synthetic peptide
ADVLLSVHLI

SEQ ID NO: 301 - protein, 9 aa, Artificial Sequence
  Description of Artificial Sequence: Synthetic peptide
APFRVNHAV

SEQ ID NO: 302 - protein, 9 aa, Artificial Sequence
  Description of Artificial Sequence: Synthetic peptide
ARHKAVEFL

SEQ ID NO: 303 - protein, 9 aa, Artificial Sequence
  Description of Artificial Sequence: Synthetic peptide
CLADVLLSV

SEQ ID NO: 304 - protein, 10 aa, Artificial Sequence
  Description of Artificial Sequence: Synthetic peptide
CLADVLLSVH

SEQ ID NO: 305 - protein, 9 aa, Artificial Sequence
  Description of Artificial Sequence: Synthetic peptide
DVLLSVHLI

SEQ ID NO: 306 - protein, 10 aa, Artificial Sequence
  Description of Artificial Sequence: Synthetic peptide
DVLLSVHLIV

SEQ ID NO: 307 - protein, 10 aa, Artificial Sequence
  Description of Artificial Sequence: Synthetic peptide
FLQERNLPPK

SEQ ID NO: 308 - protein, 9 aa, Artificial Sequence
  Description of Artificial Sequence: Synthetic peptide
FRVNHAVEW

SEQ ID NO: 309 - protein, 9 aa, Artificial Sequence
  Description of Artificial Sequence: Synthetic peptide
HLIVLRVVR

SEQ ID NO: 310 - protein, 10 aa, Artificial Sequence
  Description of Artificial Sequence: Synthetic peptide
HLIVLRVVRL

SEQ ID NO: 311 - protein, 10 aa, Artificial Sequence
  Description of Artificial Sequence: Synthetic peptide
HLNTMFRRPH

SEQ ID NO: 312 - protein, 9 aa, Artificial Sequence
  Description of Artificial Sequence: Synthetic peptide
HPKVHLNTM

SEQ ID NO: 313 - protein, 10 aa, Artificial Sequence
  Description of Artificial Sequence: Synthetic peptide
HPKVHLNTMF

SEQ ID NO: 314 - protein, 9 aa, Artificial Sequence
  Description of Artificial Sequence: Synthetic peptide
KAVEFLQER

SEQ ID NO: 315 - protein, 9 aa, Artificial Sequence
  Description of Artificial Sequence: Synthetic peptide
KVHLNTMFR

SEQ ID NO: 316 - protein, 10 aa, Artificial Sequence
  Description of Artificial Sequence: Synthetic peptide
KVHLNTMFRR

SEQ ID NO: 317 - protein, 9 aa, Artificial Sequence
  Description of Artificial Sequence: Synthetic peptide
KVVLRHPKV

SEQ ID NO: 318 - protein, 9 aa, Artificial Sequence
  Description of Artificial Sequence: Synthetic peptide
LLSVHLIVL

SEQ ID NO: 319 - protein, 10 aa, Artificial Sequence
  Description of Artificial Sequence: Synthetic peptide
LLSVHLIVLR

SEQ ID NO: 320 - protein, 9 aa, Artificial Sequence
  Description of Artificial Sequence: Synthetic peptide
LPAPFRVNH

SEQ ID NO: 321 - protein, 10 aa, Artificial Sequence
  Description of Artificial Sequence: Synthetic peptide
LPAPFRVNHA

SEQ ID NO: 322 - protein, 10 aa, Artificial Sequence
  Description of Artificial Sequence: Synthetic peptide
LQERNLPPKV

SEQ ID NO: 323 - protein, 10 aa, Artificial Sequence
  Description of Artificial Sequence: Synthetic peptide
LRVVRLPAPF

SEQ ID NO: 324 - protein, 9 aa, Artificial Sequence
  Description of Artificial Sequence: Synthetic peptide
LSVHLIVLR

SEQ ID NO: 325 - protein, 10 aa, Artificial Sequence
  Description of Artificial Sequence: Synthetic peptide
LSVHLIVLRV

SEQ ID NO: 326 - protein, 9 aa, Artificial Sequence
  Description of Artificial Sequence: Synthetic peptide
MFRRPHSCL

SEQ ID NO: 327 - protein, 10 aa, Artificial Sequence
  Description of Artificial Sequence: Synthetic peptide
MFRRPHSCLA

SEQ ID NO: 328 - protein, 9 aa, Artificial Sequence
  Description of Artificial Sequence: Synthetic peptide
NLPPKVVLR

SEQ ID NO: 329 - protein, 10 aa, Artificial Sequence
  Description of Artificial Sequence: Synthetic peptide
NTMFRRPHSC

SEQ ID NO: 330 - protein, 9 aa, Artificial Sequence
  Description of Artificial Sequence: Synthetic peptide
QERNLPPKV

SEQ ID NO: 331 - protein, 10 aa, Artificial Sequence
  Description of Artificial Sequence: Synthetic peptide
RHPKVHLNTM

SEQ ID NO: 332 - protein, 9 aa, Artificial Sequence
  Description of Artificial Sequence: Synthetic peptide
RNLPPKVVL

SEQ ID NO: 333 - protein, 10 aa, Artificial Sequence
  Description of Artificial Sequence: Synthetic peptide
RNLPPKVVLR

SEQ ID NO: 334 - protein, 9 aa, Artificial Sequence
  Description of Artificial Sequence: Synthetic peptide
RPHSCLADV

SEQ ID NO: 335 - protein, 10 aa, Artificial Sequence
  Description of Artificial Sequence: Synthetic peptide
RPHSCLADVL

SEQ ID NO: 336 - protein, 9 aa, Artificial Sequence
  Description of Artificial Sequence: Synthetic peptide
RVVRLPAPF

SEQ ID NO: 337 - protein, 10 aa, Artificial Sequence
  Description of Artificial Sequence: Synthetic peptide
RVVRLPAPFR

SEQ ID NO: 338 - protein, 10 aa, Artificial Sequence
  Description of Artificial Sequence: Synthetic peptide
SARHKAVEFL

SEQ ID NO: 339 - protein, 9 aa, Artificial Sequence
  Description of Artificial Sequence: Synthetic peptide
SVHLIVLRV

SEQ ID NO: 340 - protein, 10 aa, Artificial Sequence
  Description of Artificial Sequence: Synthetic peptide
SVHLIVLRVV

SEQ ID NO: 341 - protein, 9 aa, Artificial Sequence
  Description of Artificial Sequence: Synthetic peptide
TMFRRPHSC

SEQ ID NO: 342 - protein, 10 aa, Artificial Sequence
  Description of Artificial Sequence: Synthetic peptide
TMFRRPHSCL

SEQ ID NO: 343 - protein, 9 aa, Artificial Sequence
  Description of Artificial Sequence: Synthetic peptide
VEFLQERNL

SEQ ID NO: 344 - protein, 9 aa, Artificial Sequence
  Description of Artificial Sequence: Synthetic peptide
VLLSVHLIV

SEQ ID NO: 345 - protein, 10 aa, Artificial Sequence
  Description of Artificial Sequence: Synthetic peptide
VLLSVHLIVL

SEQ ID NO: 346 - protein, 9 aa, Artificial Sequence
  Description of Artificial Sequence: Synthetic peptide
VLRHPKVHL

SEQ ID NO: 347 - protein, 9 aa, Artificial Sequence
  Description of Artificial Sequence: Synthetic peptide
VLRVVRLPA

SEQ ID NO: 348 - protein, 9 aa, Artificial Sequence
  Description of Artificial Sequence: Synthetic peptide
VVRLPAPFR

SEQ ID NO: 349 - protein, 10 aa, Artificial Sequence
  Description of Artificial Sequence: Synthetic peptide
VVRLPAPFRV

SEQ ID NO: 350 - protein, 9 aa, Artificial Sequence
  Description of Artificial Sequence: Synthetic peptide
AAWRSCIAL

SEQ ID NO: 351 - protein, 10 aa, Artificial Sequence
  Description of Artificial Sequence: Synthetic peptide
AAWRSCIALW

SEQ ID NO: 352 - protein, 9 aa, Artificial Sequence
  Description of Artificial Sequence: Synthetic peptide
AETVSLHPL

SEQ ID NO: 353 - protein, 10 aa, Artificial Sequence
  Description of Artificial Sequence: Synthetic peptide
AETVSLHPLA

SEQ ID NO: 354 - protein, 9 aa, Artificial Sequence
  Description of Artificial Sequence: Synthetic peptide
AHMALLPSG

SEQ ID NO: 355 - protein, 9 aa, Artificial Sequence
  Description of Artificial Sequence: Synthetic peptide
ALWCASSVT

SEQ ID NO: 356 - protein, 10 aa, Artificial Sequence
  Description of Artificial Sequence: Synthetic peptide
AMPILPLPQL

SEQ ID NO: 357 - protein, 10 aa, Artificial Sequence
  Description of Artificial Sequence: Synthetic peptide
APLLAAPSPA

SEQ ID NO: 358 - protein, 9 aa, Artificial Sequence
  Description of Artificial Sequence: Synthetic peptide
APRTNFHSS

SEQ ID NO: 359 - protein, 10 aa, Artificial Sequence
  Description of Artificial Sequence: Synthetic peptide
APRTNFHSSL

SEQ ID NO: 360 - protein, 10 aa, Artificial Sequence
  Description of Artificial Sequence: Synthetic peptide
ASNKLPSLPL

SEQ ID NO: 361 - protein, 9 aa, Artificial Sequence
  Description of Artificial Sequence: Synthetic peptide
AWRSCIALW

SEQ ID NO: 362 - protein, 10 aa, Artificial Sequence
  Description of Artificial Sequence: Synthetic peptide
CAGRWLWYCW

SEQ ID NO: 363 - protein, 10 aa, Artificial Sequence
  Description of Artificial Sequence: Synthetic peptide
CIALWCASSV

SEQ ID NO: 364 - protein, 10 aa, Artificial Sequence
  Description of Artificial Sequence: Synthetic peptide
CPQPSPSLPA

SEQ ID NO: 365 - protein, 10 aa, Artificial Sequence
  Description of Artificial Sequence: Synthetic peptide
CRRAVSATSW

SEQ ID NO: 366 - protein, 10 aa, Artificial Sequence
  Description of Artificial Sequence: Synthetic peptide
CTACHTALGR

SEQ ID NO: 367 - protein, 10 aa, Artificial Sequence
  Description of Artificial Sequence: Synthetic peptide
DQQAAPRTNF

SEQ ID NO: 368 - protein, 9 aa, Artificial Sequence
  Description of Artificial Sequence: Synthetic peptide
ETVSLHPLA

SEQ ID NO: 369 - protein, 9 aa, Artificial Sequence
  Description of Artificial Sequence: Synthetic peptide
FHSSLAETV

SEQ ID NO: 370 - protein, 10 aa, Artificial Sequence
  Description of Artificial Sequence: Synthetic peptide
GMYSPSRYPR

SEQ ID NO: 371 - protein, 9 aa, Artificial Sequence
  Description of Artificial Sequence: Synthetic peptide
GQWMAHMAL

SEQ ID NO: 372 - protein, 10 aa, Artificial Sequence
  Description of Artificial Sequence: Synthetic peptide
GQWMAHMALL

SEQ ID NO: 373 - protein, 10 aa, Artificial Sequence
  Description of Artificial Sequence: Synthetic peptide
GRCTACHTAL

SEQ ID NO: 374 - protein, 9 aa, Artificial Sequence
  Description of Artificial Sequence: Synthetic peptide
GTAWQLVPL

SEQ ID NO: 375 - protein, 9 aa, Artificial Sequence
  Description of Artificial Sequence: Synthetic peptide
HMALLPSGT

SEQ ID NO: 376 - protein, 10 aa, Artificial Sequence
  Description of Artificial Sequence: Synthetic peptide
HMALLPSGTK

SEQ ID NO: 377 - protein, 9 aa, Artificial Sequence
  Description of Artificial Sequence: Synthetic peptide
HPLAPMPSK

SEQ ID NO: 378 - protein, 10 aa, Artificial Sequence
  Description of Artificial Sequence: Synthetic peptide
HSSLAETVSL

SEQ ID NO: 379 - protein, 9 aa, Artificial Sequence
  Description of Artificial Sequence: Synthetic peptide
HTALGRGSL

SEQ ID NO: 380 - protein, 9 aa, Artificial Sequence
  Description of Artificial Sequence: Synthetic peptide
IALWCASSV

SEQ ID NO: 381 - protein, 9 aa, Artificial Sequence
  Description of Artificial Sequence: Synthetic peptide
ILATPPSAA

SEQ ID NO: 382 - protein, 10 aa, Artificial Sequence
  Description of Artificial Sequence: Synthetic peptide
ILATPPSAAW

SEQ ID NO: 383 - protein, 9 aa, Artificial Sequence
  Description of Artificial Sequence: Synthetic peptide
IPMAISSPP

SEQ ID NO: 384 - protein, 10 aa, Artificial Sequence
  Description of Artificial Sequence: Synthetic peptide
IPMAISSPPK

SEQ ID NO: 385 - protein, 9 aa, Artificial Sequence
  Description of Artificial Sequence: Synthetic peptide
ISSPPKAPL

SEQ ID NO: 386 - protein, 10 aa, Artificial Sequence
  Description of Artificial Sequence: Synthetic peptide
ISSPPKAPLL

SEQ ID NO: 387 - protein, 10 aa, Artificial Sequence
  Description of Artificial Sequence: Synthetic peptide
ITSGQWMAHM

SEQ ID NO: 388 - protein, 9 aa, Artificial Sequence
  Description of Artificial Sequence: Synthetic peptide
KGRCTACHT

SEQ ID NO: 389 - protein, 10 aa, Artificial Sequence
  Description of Artificial Sequence: Synthetic peptide
KGRCTACHTA

SEQ ID NO: 390 - protein, 9 aa, Artificial Sequence
  Description of Artificial Sequence: Synthetic peptide
KLPSLPLSK

SEQ ID NO: 391 - protein, 10 aa, Artificial Sequence
  Description of Artificial Sequence: Synthetic peptide
KLPSLPLSKM

SEQ ID NO: 392 - protein, 9 aa, Artificial Sequence
  Description of Artificial Sequence: Synthetic peptide
KMYTTSMAM

SEQ ID NO: 393 - protein, 10 aa, Artificial Sequence
  Description of Artificial Sequence: Synthetic peptide
KMYTTSMAMP

SEQ ID NO: 394 - protein, 9 aa, Artificial Sequence
  Description of Artificial Sequence: Synthetic peptide
LAAPSPASR

SEQ ID NO: 395 - protein, 10 aa, Artificial Sequence
  Description of Artificial Sequence: Synthetic peptide
LAAPSPASRL

SEQ ID NO: 396 - protein, 10 aa, Artificial Sequence
  Description of Artificial Sequence: Synthetic peptide
LAETVSLHPL

SEQ ID NO: 397 - protein, 9 aa, Artificial Sequence
  Description of Artificial Sequence: Synthetic peptide
LATPPSAAW

SEQ ID NO: 398 - protein, 10 aa, Artificial Sequence
  Description of Artificial Sequence: Synthetic peptide
LATPPSAAWR

SEQ ID NO: 399 - protein, 10 aa, Artificial Sequence
  Description of Artificial Sequence: Synthetic peptide
LLAAPSPASR

SEQ ID NO: 400 - protein, 10 aa, Artificial Sequence
  Description of Artificial Sequence: Synthetic peptide
LLLSADQQAA

SEQ ID NO: 401 - protein, 9 aa, Artificial Sequence
  Description of Artificial Sequence: Synthetic peptide
LLSADQQAA

SEQ ID NO: 402 - protein, 9 aa, Artificial Sequence
  Description of Artificial Sequence: Synthetic peptide
LPASNKLPS

SEQ ID NO: 403 - protein, 10 aa, Artificial Sequence
  Description of Artificial Sequence: Synthetic peptide
LPASNKLPSL

SEQ ID NO: 404 - protein, 9 aa, Artificial Sequence
  Description of Artificial Sequence: Synthetic peptide
LPLPQLLLS

SEQ ID NO: 405 - protein, 10 aa, Artificial Sequence
  Description of Artificial Sequence: Synthetic peptide
LPLPQLLLSA

SEQ ID NO: 406 - protein, 9 aa, Artificial Sequence
  Description of Artificial Sequence: Synthetic peptide
LPSLPLSKM

SEQ ID NO: 407 - protein, 10 aa, Artificial Sequence
  Description of Artificial Sequence: Synthetic peptide
LPSLPLSKMY

SEQ ID NO: 408 - protein, 10 aa, Artificial Sequence
  Description of Artificial Sequence: Synthetic peptide
LQCINSNSRI

SEQ ID NO: 409 - protein, 9 aa, Artificial Sequence
  Description of Artificial Sequence: Synthetic peptide
LQCRRAVSA

SEQ ID NO: 410 - protein, 10 aa, Artificial Sequence
  Description of Artificial Sequence: Synthetic peptide
LQCRRAVSAT

SEQ ID NO: 411 - protein, 10 aa, Artificial Sequence
  Description of Artificial Sequence: Synthetic peptide
LSADQQAAPR

SEQ ID NO: 412 - protein, 9 aa, Artificial Sequence
  Description of Artificial Sequence: Synthetic peptide
LSKMYTTSM

SEQ ID NO: 413 - protein, 10 aa, Artificial Sequence
  Description of Artificial Sequence: Synthetic peptide
LSKMYTTSMA

SEQ ID NO: 414 - protein, 10 aa, Artificial Sequence
  Description of Artificial Sequence: Synthetic peptide
LWCASSVTER

SEQ ID NO: 415 - protein, 9 aa, Artificial Sequence
  Description of Artificial Sequence: Synthetic peptide
LWYCWPTWL

SEQ ID NO: 416 - protein, 10 aa, Artificial Sequence
  Description of Artificial Sequence: Synthetic peptide
LWYCWPTWLR

SEQ ID NO: 417 - protein, 9 aa, Artificial Sequence
  Description of Artificial Sequence: Synthetic peptide
MAHMALLPS

SEQ ID NO: 418 - protein, 9 aa, Artificial Sequence
  Description of Artificial Sequence: Synthetic peptide
MALLPSGTK

SEQ ID NO: 419 - protein, 9 aa, Artificial Sequence
  Description of Artificial Sequence: Synthetic peptide
MPILPLPQL

SEQ ID NO: 420 - protein, 10 aa, Artificial Sequence
  Description of Artificial Sequence: Synthetic peptide
MPILPLPQLL

SEQ ID NO: 421 - protein, 9 aa, Artificial Sequence
  Description of Artificial Sequence: Synthetic peptide
MYSPSRYPR

SEQ ID NO: 422 - protein, 10 aa, Artificial Sequence
  Description of Artificial Sequence: Synthetic peptide
MYTTSMAMPI

SEQ ID NO: 423 - protein, 9 aa, Artificial Sequence
  Description of Artificial Sequence: Synthetic peptide
PMAISSPPK

SEQ ID NO: 424 - protein, 9 aa, Artificial Sequence
  Description of Artificial Sequence: Synthetic peptide
QLVPLQCRR

SEQ ID NO: 425 - protein, 9 aa, Artificial Sequence
  Description of Artificial Sequence: Synthetic peptide
QQAAPRTNF

SEQ ID NO: 426 - protein, 10 aa, Artificial Sequence
  Description of Artificial Sequence: Synthetic peptide
QQAAPRTNFH

SEQ ID NO: 427 - protein, 9 aa, Artificial Sequence
  Description of Artificial Sequence: Synthetic peptide
QWMAHMALL

SEQ ID NO: 428 - protein, 9 aa, Artificial Sequence
  Description of Artificial Sequence: Synthetic peptide
RAVSATSWA

SEQ ID NO: 429 - protein, 10 aa, Artificial Sequence
  Description of Artificial Sequence: Synthetic peptide
RAVSATSWAS

SEQ ID NO: 430 - protein, 9 aa, Artificial Sequence
  Description of Artificial Sequence: Synthetic peptide
RCAGRWLWY

SEQ ID NO: 431 - protein, 9 aa, Artificial Sequence
  Description of Artificial Sequence: Synthetic peptide
RCTACHTAL

SEQ ID NO: 432 - protein, 10 aa, Artificial Sequence
  Description of Artificial Sequence: Synthetic peptide
RGTAWQLVPL

SEQ ID NO: 433 - protein, 10 aa, Artificial Sequence
  Description of Artificial Sequence: Synthetic peptide
RLQCINSNSR

SEQ ID NO: 434 - protein, 9 aa, Artificial Sequence
  Description of Artificial Sequence: Synthetic peptide
RRAVSATSW

SEQ ID NO: 435 - protein, 9 aa, Artificial Sequence
  Description of Artificial Sequence: Synthetic peptide
RTNFHSSLA

SEQ ID NO: 436 - protein, 10 aa, Artificial Sequence
  Description of Artificial Sequence: Synthetic peptide
RTNFHSSLAE

SEQ ID NO: 437 - protein, 9 aa, Artificial Sequence
  Description of Artificial Sequence: Synthetic peptide
RTRCAGRWL

SEQ ID NO: 438 - protein, 10 aa, Artificial Sequence
  Description of Artificial Sequence: Synthetic peptide
RTRCAGRWLW

SEQ ID NO: 439 - protein, 9 aa, Artificial Sequence
  Description of Artificial Sequence: Synthetic peptide
RWLWYCWPT

SEQ ID NO: 440 - protein, 10 aa, Artificial Sequence
  Description of Artificial Sequence: Synthetic peptide
RWLWYCWPTW

SEQ ID NO: 441 - protein, 9 aa, Artificial Sequence
  Description of Artificial Sequence: Synthetic peptide
SAAWRSCIA

SEQ ID NO: 442 - protein, 10 aa, Artificial Sequence
  Description of Artificial Sequence: Synthetic peptide
SAAWRSCIAL

SEQ ID NO: 443 - protein, 10 aa, Artificial Sequence
  Description of Artificial Sequence: Synthetic peptide
SGQWMAHMAL

SEQ ID NO: 444 - protein, 9 aa, Artificial Sequence
  Description of Artificial Sequence: Synthetic peptide
SKMYTTSMA

SEQ ID NO: 445 - protein, 10 aa, Artificial Sequence
  Description of Artificial Sequence: Synthetic peptide
SKMYTTSMAM

SEQ ID NO: 446 - protein, 9 aa, Artificial Sequence
  Description of Artificial Sequence: Synthetic peptide
SMAMPILPL

SEQ ID NO: 447 - protein, 9 aa, Artificial Sequence
  Description of Artificial Sequence: Synthetic peptide
SNKLPSLPL

SEQ ID NO: 448 - protein, 9 aa, Artificial Sequence
  Description of Artificial Sequence: Synthetic peptide
SPASRLQCI

SEQ ID NO: 449 - protein, 10 aa, Artificial Sequence
  Description of Artificial Sequence: Synthetic peptide
SPPKAPLLAA

SEQ ID NO: 450 - protein, 10 aa, Artificial Sequence
  Description of Artificial Sequence: Synthetic peptide
SPSLPASNKL

SEQ ID NO: 451 - protein, 9 aa, Artificial Sequence
  Description of Artificial Sequence: Synthetic peptide
SRITSGQWM

SEQ ID NO: 452 - protein, 10 aa, Artificial Sequence
  Description of Artificial Sequence: Synthetic peptide
SSCPQPSPSL

SEQ ID NO: 453 - protein, 9 aa, Artificial Sequence
  Description of Artificial Sequence: Synthetic peptide
SSLAETVSL

SEQ ID NO: 454 - protein, 10 aa, Artificial Sequence
  Description of Artificial Sequence: Synthetic peptide
SSNDMIPMAI

SEQ ID NO: 455 - protein, 9 aa, Artificial Sequence
  Description of Artificial Sequence: Synthetic peptide
SSSNDMIPM

SEQ ID NO: 456 - protein, 10 aa, Artificial Sequence
  Description of Artificial Sequence: Synthetic peptide
SSSSNDMIPM

SEQ ID NO: 457 - protein, 9 aa, Artificial Sequence
  Description of Artificial Sequence: Synthetic peptide
SSSSSSNDM

SEQ ID NO: 458 - protein, 10 aa, Artificial Sequence
  Description of Artificial Sequence: Synthetic peptide
SSSSSSSNDM

SEQ ID NO: 459 - protein, 9 aa, Artificial Sequence
  Description of Artificial Sequence: Synthetic peptide
TACHTALGR

SEQ ID NO: 460 - protein, 10 aa, Artificial Sequence
  Description of Artificial Sequence: Synthetic peptide
TERTRCAGRW

SEQ ID NO: 461 - protein, 10 aa, Artificial Sequence
  Description of Artificial Sequence: Synthetic peptide
TSMAMPILPL

SEQ ID NO: 462 - protein, 9 aa, Artificial Sequence
  Description of Artificial Sequence: Synthetic peptide
TTSMAMPIL

SEQ ID NO: 463 - protein, 10 aa, Artificial Sequence
  Description of Artificial Sequence: Synthetic peptide
TVSLHPLAPM

SEQ ID NO: 464 - protein, 10 aa, Artificial Sequence
  Description of Artificial Sequence: Synthetic peptide
TWLRGTAWQL

SEQ ID NO: 465 - protein, 9 aa, Artificial Sequence
  Description of Artificial Sequence: Synthetic peptide
VPLQCRRAV

SEQ ID NO: 466 - protein, 9 aa, Artificial Sequence
  Description of Artificial Sequence: Synthetic peptide
VSLHPLAPM

SEQ ID NO: 467 - protein, 10 aa, Artificial Sequence
  Description of Artificial Sequence: Synthetic peptide
VTERTRCAGR

SEQ ID NO: 468 - protein, 9 aa, Artificial Sequence
  Description of Artificial Sequence: Synthetic peptide
WLRGTAWQL

SEQ ID NO: 469 - protein, 10 aa, Artificial Sequence
  Description of Artificial Sequence: Synthetic peptide
WLRGTAWQLV

SEQ ID NO: 470 - protein, 9 aa, Artificial Sequence
  Description of Artificial Sequence: Synthetic peptide
WLWYCWPTW

SEQ ID NO: 471 - protein, 10 aa, Artificial Sequence
  Description of Artificial Sequence: Synthetic peptide
WLWYCWPTWL

SEQ ID NO: 472 - protein, 10 aa, Artificial Sequence
  Description of Artificial Sequence: Synthetic peptide
WMAHMALLPS

SEQ ID NO: 473 - protein, 9 aa, Artificial Sequence
  Description of Artificial Sequence: Synthetic peptide
WPTWLRGTA

SEQ ID NO: 474 - protein, 10 aa, Artificial Sequence
  Description of Artificial Sequence: Synthetic peptide
WPTWLRGTAW

SEQ ID NO: 475 - protein, 9 aa, Artificial Sequence
  Description of Artificial Sequence: Synthetic peptide
WYCWPTWLR

SEQ ID NO: 476 - protein, 9 aa, Artificial Sequence
  Description of Artificial Sequence: Synthetic peptide
YPRSSSSSS

SEQ ID NO: 477 - protein, 10 aa, Artificial Sequence
  Description of Artificial Sequence: Synthetic peptide
YPRSSSSSSS

SEQ ID NO: 478 - protein, 9 aa, Artificial Sequence
  Description of Artificial Sequence: Synthetic peptide
YTTSMAMPI

SEQ ID NO: 479 - protein, 10 aa, Artificial Sequence
  Description of Artificial Sequence: Synthetic peptide
YTTSMAMPIL

SEQ ID NO: 480 - protein, 10 aa, Artificial Sequence
  Description of Artificial Sequence: Synthetic peptide
ALAVLALLSF

SEQ ID NO: 481 - protein, 10 aa, Artificial Sequence
  Description of Artificial Sequence: Synthetic peptide
ALLSFWPGGY

SEQ ID NO: 482 - protein, 10 aa, Artificial Sequence
  Description of Artificial Sequence: Synthetic peptide
DSGLLTSSSR

SEQ ID NO: 483 - protein, 10 aa, Artificial Sequence
  Description of Artificial Sequence: Synthetic peptide
ELLCVWVSSI

SEQ ID NO: 484 - protein, 9 aa, Artificial Sequence
  Description of Artificial Sequence: Synthetic peptide
EWKVKFPEL

SEQ ID NO: 485 - protein, 9 aa, Artificial Sequence
  Description of Artificial Sequence: Synthetic peptide
FPELLCVWV

SEQ ID NO: 486 - protein, 9 aa, Artificial Sequence
  Description of Artificial Sequence: Synthetic peptide
FWPGGYPAY

SEQ ID NO: 487 - protein, 10 aa, Artificial Sequence
  Description of Artificial Sequence: Synthetic peptide
GLLTSSSREW

SEQ ID NO: 488 - protein, 9 aa, Artificial Sequence
  Description of Artificial Sequence: Synthetic peptide
KFPELLCVW

SEQ ID NO: 489 - protein, 10 aa, Artificial Sequence
  Description of Artificial Sequence: Synthetic peptide
KFPELLCVWV

SEQ ID NO: 490 - protein, 9 aa, Artificial Sequence
  Description of Artificial Sequence: Synthetic peptide
KVKFPELLC

SEQ ID NO: 491 - protein, 10 aa, Artificial Sequence
  Description of Artificial Sequence: Synthetic peptide
KVKFPELLCV

SEQ ID NO: 492 - protein, 9 aa, Artificial Sequence
  Description of Artificial Sequence: Synthetic peptide
LAVLALLSF

SEQ ID NO: 493 - protein, 10 aa, Artificial Sequence
  Description of Artificial Sequence: Synthetic peptide
LAVLALLSFW

SEQ ID NO: 494 - protein, 10 aa, Artificial Sequence
  Description of Artificial Sequence: Synthetic peptide
LLCVWVSSIR

SEQ ID NO: 495 - protein, 9 aa, Artificial Sequence
  Description of Artificial Sequence: Synthetic peptide
LLSFWPGGY

SEQ ID NO: 496 - protein, 9 aa, Artificial Sequence
  Description of Artificial Sequence: Synthetic peptide
LLTSSSREW

SEQ ID NO: 497 - protein, 10 aa, Artificial Sequence
  Description of Artificial Sequence: Synthetic peptide
LLTSSSREWK

SEQ ID NO: 498 - protein, 10 aa, Artificial Sequence
  Description of Artificial Sequence: Synthetic peptide
LSFWPGGYPA

SEQ ID NO: 499 - protein, 9 aa, Artificial Sequence
  Description of Artificial Sequence: Synthetic peptide
LTSSSREWK

SEQ ID NO: 500 - protein, 10 aa, Artificial Sequence
  Description of Artificial Sequence: Synthetic peptide
LTSSSREWKV

SEQ ID NO: 501 - protein, 9 aa, Artificial Sequence
  Description of Artificial Sequence: Synthetic peptide
REWKVKFPE

SEQ ID NO: 502 - protein, 10 aa, Artificial Sequence
  Description of Artificial Sequence: Synthetic peptide
REWKVKFPEL

SEQ ID NO: 503 - protein, 9 aa, Artificial Sequence
  Description of Artificial Sequence: Synthetic peptide
SFWPGGYPA

SEQ ID NO: 504 - protein, 10 aa, Artificial Sequence
  Description of Artificial Sequence: Synthetic peptide
SFWPGGYPAY

SEQ ID NO: 505 - protein, 9 aa, Artificial Sequence
  Description of Artificial Sequence: Synthetic peptide
SSREWKVKF

SEQ ID NO: 506 - protein, 9 aa, Artificial Sequence
  Description of Artificial Sequence: Synthetic peptide
SSSREWKVK

SEQ ID NO: 507 - protein, 10 aa, Artificial Sequence
  Description of Artificial Sequence: Synthetic peptide
SSSREWKVKF

SEQ ID NO: 508 - protein, 9 aa, Artificial Sequence
  Description of Artificial Sequence: Synthetic peptide
TSSSREWKV

SEQ ID NO: 509 - protein, 10 aa, Artificial Sequence
  Description of Artificial Sequence: Synthetic peptide
TSSSREWKVK

SEQ ID NO: 510 - protein, 9 aa, Artificial Sequence
  Description of Artificial Sequence: Synthetic peptide
VKFPELLCV

SEQ ID NO: 511 - protein, 10 aa, Artificial Sequence
  Description of Artificial Sequence: Synthetic peptide
VKFPELLCVW

SEQ ID NO: 512 - protein, 9 aa, Artificial Sequence
  Description of Artificial Sequence: Synthetic peptide
WKVKFPELL

SEQ ID NO: 513 - protein, 10 aa, Artificial Sequence
  Description of Artificial Sequence: Synthetic peptide
YPAYSKDSGL

SEQ ID NO: 514 - protein, 9 aa, Artificial Sequence
  Description of Artificial Sequence: Synthetic peptide
AALSRHNVL

SEQ ID NO: 515 - protein, 9 aa, Artificial Sequence
  Description of Artificial Sequence: Synthetic peptide
ADAPAIQPV

SEQ ID NO: 516 - protein, 10 aa, Artificial Sequence
  Description of Artificial Sequence: Synthetic peptide
ADAPAIQPVL

SEQ ID NO: 517 - protein, 9 aa, Artificial Sequence
  Description of Artificial Sequence: Synthetic peptide
AESKIMFAT

SEQ ID NO: 518 - protein, 10 aa, Artificial Sequence
  Description of Artificial Sequence: Synthetic peptide
AESKIMFATL

SEQ ID NO: 519 - protein, 9 aa, Artificial Sequence
  Description of Artificial Sequence: Synthetic peptide
AIQPVLWTT

SEQ ID NO: 520 - protein, 9 aa, Artificial Sequence
  Description of Artificial Sequence: Synthetic peptide
ALQPLQPHA

SEQ ID NO: 521 - protein, 9 aa, Artificial Sequence
  Description of Artificial Sequence: Synthetic peptide
APAIQPVLW

SEQ ID NO: 522 - protein, 10 aa, Artificial Sequence
  Description of Artificial Sequence: Synthetic peptide
ARVPAVPFDL

SEQ ID NO: 523 - protein, 9 aa, Artificial Sequence
  Description of Artificial Sequence: Synthetic peptide
ATLQRSSLW

SEQ ID NO: 524 - protein, 10 aa, Artificial Sequence
  Description of Artificial Sequence: Synthetic peptide
AVPFDLHFCR

SEQ ID NO: 525 - protein, 9 aa, Artificial Sequence
  Description of Artificial Sequence: Synthetic peptide
CSMLTGPPA

SEQ ID NO: 526 - protein, 10 aa, Artificial Sequence
  Description of Artificial Sequence: Synthetic peptide
CSMLTGPPAR

SEQ ID NO: 527 - protein, 9 aa, Artificial Sequence
  Description of Artificial Sequence: Synthetic peptide
DLHFCRSSI

SEQ ID NO: 528 - protein, 10 aa, Artificial Sequence
  Description of Artificial Sequence: Synthetic peptide
DLHFCRSSIM

SEQ ID NO: 529 - protein, 9 aa, Artificial Sequence
  Description of Artificial Sequence: Synthetic peptide
EPHLALQPL

SEQ ID NO: 530 - protein, 9 aa, Artificial Sequence
  Description of Artificial Sequence: Synthetic peptide
ESKIMFATL

SEQ ID NO: 531 - protein, 9 aa, Artificial Sequence
  Description of Artificial Sequence: Synthetic peptide
FATLQRSSL

SEQ ID NO: 532 - protein, 10 aa, Artificial Sequence
  Description of Artificial Sequence: Synthetic peptide
FATLQRSSLW

SEQ ID NO: 533 - protein, 10 aa, Artificial Sequence
  Description of Artificial Sequence: Synthetic peptide
FCRSSIMKPK

SEQ ID NO: 534 - protein, 10 aa, Artificial Sequence
  Description of Artificial Sequence: Synthetic peptide
FDLHFCRSSI

SEQ ID NO: 535 - protein, 9 aa, Artificial Sequence
  Description of Artificial Sequence: Synthetic peptide
FLKAESKIM

SEQ ID NO: 536 - protein, 10 aa, Artificial Sequence
  Description of Artificial Sequence: Synthetic peptide
FLKAESKIMF

SEQ ID NO: 537 - protein, 9 aa, Artificial Sequence
  Description of Artificial Sequence: Synthetic peptide
GPPARVPAV

SEQ ID NO: 538 - protein, 10 aa, Artificial Sequence
  Description of Artificial Sequence: Synthetic peptide
GYMFLKAESK

SEQ ID NO: 539 - protein, 10 aa, Artificial Sequence
  Description of Artificial Sequence: Synthetic peptide
HADAPAIQPV

SEQ ID NO: 540 - protein, 9 aa, Artificial Sequence
  Description of Artificial Sequence: Synthetic peptide
HAHADAPAI

SEQ ID NO: 541 - protein, 9 aa, Artificial Sequence
  Description of Artificial Sequence: Synthetic peptide
HFCRSSIMK

SEQ ID NO: 542 - protein, 10 aa, Artificial Sequence
  Description of Artificial Sequence: Synthetic peptide
HLALQPLQPH

SEQ ID NO: 543 - protein, 10 aa, Artificial Sequence
  Description of Artificial Sequence: Synthetic peptide
HMSSLSHISA

SEQ ID NO: 544 - protein, 9 aa, Artificial Sequence
  Description of Artificial Sequence: Synthetic peptide
HPLQHGHRH

SEQ ID NO: 545 - protein, 9 aa, Artificial Sequence
  Description of Artificial Sequence: Synthetic peptide
HPPSSLSFW

SEQ ID NO: 546 - protein, 10 aa, Artificial Sequence
  Description of Artificial Sequence: Synthetic peptide
HRHGLEPCSM

SEQ ID NO: 547 - protein, 9 aa, Artificial Sequence
  Description of Artificial Sequence: Synthetic peptide
IMFATLQRS

SEQ ID NO: 548 - protein, 10 aa, Artificial Sequence
  Description of Artificial Sequence: Synthetic peptide
IMFATLQRSS

SEQ ID NO: 549 - protein, 9 aa, Artificial Sequence
  Description of Artificial Sequence: Synthetic peptide
IMKPKRDGY

SEQ ID NO: 550 - protein, 10 aa, Artificial Sequence
  Description of Artificial Sequence: Synthetic peptide
IMKPKRDGYM

SEQ ID NO: 551 - protein, 9 aa, Artificial Sequence
  Description of Artificial Sequence: Synthetic peptide
KAESKIMFA

SEQ ID NO: 552 - protein, 9 aa, Artificial Sequence
  Description of Artificial Sequence: Synthetic peptide
KIMFATLQR

SEQ ID NO: 553 - protein, 9 aa, Artificial Sequence
  Description of Artificial Sequence: Synthetic peptide
KPKRDGYMF

SEQ ID NO: 554 - protein, 10 aa, Artificial Sequence
  Description of Artificial Sequence: Synthetic peptide
KPKRDGYMFL

SEQ ID NO: 555 - protein, 9 aa, Artificial Sequence
  Description of Artificial Sequence: Synthetic peptide
LALQPLQPH

SEQ ID NO: 556 - protein, 9 aa, Artificial Sequence
  Description of Artificial Sequence: Synthetic peptide
LHFCRSSIM

SEQ ID NO: 557 - protein, 10 aa, Artificial Sequence
  Description of Artificial Sequence: Synthetic peptide
LHFCRSSIMK

SEQ ID NO: 558 - protein, 9 aa, Artificial Sequence
  Description of Artificial Sequence: Synthetic peptide
LKAESKIMF

SEQ ID NO: 559 - protein, 9 aa, Artificial Sequence
  Description of Artificial Sequence: Synthetic peptide
LQHGHRHGL

SEQ ID NO: 560 - protein, 9 aa, Artificial Sequence
  Description of Artificial Sequence: Synthetic peptide
LQPHADHAH

SEQ ID NO: 561 - protein, 9 aa, Artificial Sequence
  Description of Artificial Sequence: Synthetic peptide
LQRSSLWCL

SEQ ID NO: 562 - protein, 10 aa, Artificial Sequence
  Description of Artificial Sequence: Synthetic peptide
LQRSSLWCLC

SEQ ID NO: 563 - protein, 9 aa, Artificial Sequence
  Description of Artificial Sequence: Synthetic peptide
LSFGPHHPL

SEQ ID NO: 564 - protein, 9 aa, Artificial Sequence
  Description of Artificial Sequence: Synthetic peptide
LSFGPHPPL

SEQ ID NO: 565 - protein, 9 aa, Artificial Sequence
  Description of Artificial Sequence: Synthetic peptide
LSFWTTPPL

SEQ ID NO: 566 - protein, 10 aa, Artificial Sequence
  Description of Artificial Sequence: Synthetic peptide
LSHISALQPL

SEQ ID NO: 567 - protein, 10 aa, Artificial Sequence
  Description of Artificial Sequence: Synthetic peptide
MFATLQRSSL

SEQ ID NO: 568 - protein, 9 aa, Artificial Sequence
  Description of Artificial Sequence: Synthetic peptide
MFLKAESKI

SEQ ID NO: 569 - protein, 10 aa, Artificial Sequence
  Description of Artificial Sequence: Synthetic peptide
MFLKAESKIM

SEQ ID NO: 570 - protein, 10 aa, Artificial Sequence
  Description of Artificial Sequence: Synthetic peptide
MHPPSSLSFW

SEQ ID NO: 571 - protein, 10 aa, Artificial Sequence
  Description of Artificial Sequence: Synthetic peptide
MKPKRDGYMF

SEQ ID NO: 572 - protein, 9 aa, Artificial Sequence
  Description of Artificial Sequence: Synthetic peptide
MLTGPPARV

SEQ ID NO: 573 - protein, 9 aa, Artificial Sequence
  Description of Artificial Sequence: Synthetic peptide
MSSLSHISA

SEQ ID NO: 574 - protein, 10 aa, Artificial Sequence
  Description of Artificial Sequence: Synthetic peptide
MSSLSHISAL

SEQ ID NO: 575 - protein, 10 aa, Artificial Sequence
  Description of Artificial Sequence: Synthetic peptide
NPAALSRHNV

SEQ ID NO: 576 - protein, 9 aa, Artificial Sequence
  Description of Artificial Sequence: Synthetic peptide
PARVPAVPF

SEQ ID NO: 577 - protein, 9 aa, Artificial Sequence
  Description of Artificial Sequence: Synthetic peptide
PAVPFDLHF

SEQ ID NO: 578 - protein, 10 aa, Artificial Sequence
  Description of Artificial Sequence: Synthetic peptide
PEPHLALQPL

SEQ ID NO: 579 - protein, 10 aa, Artificial Sequence
  Description of Artificial Sequence: Synthetic peptide
PPARVPAVPF

SEQ ID NO: 580 - protein, 10 aa, Artificial Sequence
  Description of Artificial Sequence: Synthetic peptide
QPVLWTTPPL

SEQ ID NO: 581 - protein, 9 aa, Artificial Sequence
  Description of Artificial Sequence: Synthetic peptide
RHGLEPCSM

SEQ ID NO: 582 - protein, 10 aa, Artificial Sequence
  Description of Artificial Sequence: Synthetic peptide
RHNVLPEPHL

SEQ ID NO: 583 - protein, 9 aa, Artificial Sequence
  Description of Artificial Sequence: Synthetic peptide
RSSIMKPKR

SEQ ID NO: 584 - protein, 9 aa, Artificial Sequence
  Description of Artificial Sequence: Synthetic peptide
SALQPLQPH

SEQ ID NO: 585 - protein, 9 aa, Artificial Sequence
  Description of Artificial Sequence: Synthetic peptide
SHISALQPL

SEQ ID NO: 586 - protein, 10 aa, Artificial Sequence
  Description of Artificial Sequence: Synthetic peptide
SIMKPKRDGY

SEQ ID NO: 587 - protein, 10 aa, Artificial Sequence
  Description of Artificial Sequence: Synthetic peptide
SLSFGPHHPL

SEQ ID NO: 588 - protein, 10 aa, Artificial Sequence
  Description of Artificial Sequence: Synthetic peptide
SLSFGPHPPL

SEQ ID NO: 589 - protein, 10 aa, Artificial Sequence
  Description of Artificial Sequence: Synthetic peptide
SLSFWTTPPL

SEQ ID NO: 590 - protein, 9 aa, Artificial Sequence
  Description of Artificial Sequence: Synthetic peptide
SMLTGPPAR

SEQ ID NO: 591 - protein, 9 aa, Artificial Sequence
  Description of Artificial Sequence: Synthetic peptide
SSLSHISAL

SEQ ID NO: 592 - protein, 10 aa, Artificial Sequence
  Description of Artificial Sequence: Synthetic peptide
TLQRSSLWCL

SEQ ID NO: 593 - protein, 10 aa, Artificial Sequence
  Description of Artificial Sequence: Synthetic peptide
TTPPLQHGHR

SEQ ID NO: 594 - protein, 9 aa, Artificial Sequence
  Description of Artificial Sequence: Synthetic peptide
VLPEPHLAL

SEQ ID NO: 595 - protein, 10 aa, Artificial Sequence
  Description of Artificial Sequence: Synthetic peptide
VPAVPFDLHF

SEQ ID NO: 596 - protein, 9 aa, Artificial Sequence
  Description of Artificial Sequence: Synthetic peptide
VPFDLHFCR

SEQ ID NO: 597 - protein, 9 aa, Artificial Sequence
  Description of Artificial Sequence: Synthetic peptide
YMFLKAESK

SEQ ID NO: 598 - protein, 10 aa, Artificial Sequence
  Description of Artificial Sequence: Synthetic peptide
YMFLKAESKI

SEQ ID NO: 599 - protein, 9 aa, Artificial Sequence
  Description of Artificial Sequence: Synthetic peptide
APGPRGRTC

SEQ ID NO: 600 - protein, 10 aa, Artificial Sequence
  Description of Artificial Sequence: Synthetic peptide
CHYLRSRNSA

SEQ ID NO: 601 - protein, 10 aa, Artificial Sequence
  Description of Artificial Sequence: Synthetic peptide
CLRSHTCPPR

SEQ ID NO: 602 - protein, 10 aa, Artificial Sequence
  Description of Artificial Sequence: Synthetic peptide
CLWCHACLHR

SEQ ID NO: 603 - protein, 9 aa, Artificial Sequence
  Description of Artificial Sequence: Synthetic peptide
CPHLGSHPC

SEQ ID NO: 604 - protein, 10 aa, Artificial Sequence
  Description of Artificial Sequence: Synthetic peptide
CPHRLRSLPR

SEQ ID NO: 605 - protein, 9 aa, Artificial Sequence
  Description of Artificial Sequence: Synthetic peptide
CPLGLKSPL

SEQ ID NO: 606 - protein, 9 aa, Artificial Sequence
  Description of Artificial Sequence: Synthetic peptide
CPPGLRNRI

SEQ ID NO: 607 - protein, 10 aa, Artificial Sequence
  Description of Artificial Sequence: Synthetic peptide
CPPGLRSHTY

SEQ ID NO: 608 - protein, 9 aa, Artificial Sequence
  Description of Artificial Sequence: Synthetic peptide
CPPRLRDHI

SEQ ID NO: 609 - protein, 10 aa, Artificial Sequence
  Description of Artificial Sequence: Synthetic peptide
CPPSLRSHAY

SEQ ID NO: 610 - protein, 9 aa, Artificial Sequence
  Description of Artificial Sequence: Synthetic peptide
CPRSCRCPH

SEQ ID NO: 611 - protein, 10 aa, Artificial Sequence
  Description of Artificial Sequence: Synthetic peptide
CPRSCRCPHL

SEQ ID NO: 612 - protein, 10 aa, Artificial Sequence
  Description of Artificial Sequence: Synthetic peptide
CSLPLGNHPY

SEQ ID NO: 613 - protein, 10 aa, Artificial Sequence
  Description of Artificial Sequence: Synthetic peptide
CTCPPRLRSR

SEQ ID NO: 614 - protein, 9 aa, Artificial Sequence
  Description of Artificial Sequence: Synthetic peptide
DHICPLSLR

SEQ ID NO: 615 - protein, 9 aa, Artificial Sequence
  Description of Artificial Sequence: Synthetic peptide
EESPMSPHL

SEQ ID NO: 616 - protein, 9 aa, Artificial Sequence
  Description of Artificial Sequence: Synthetic peptide
ESPMSPHLR

SEQ ID NO: 617 - protein, 10 aa, Artificial Sequence
  Description of Artificial Sequence: Synthetic peptide
ESPMSPHLRY

SEQ ID NO: 618 - protein, 9 aa, Artificial Sequence
  Description of Artificial Sequence: Synthetic peptide
EVSRLSPCL

SEQ ID NO: 619 - protein, 10 aa, Artificial Sequence
  Description of Artificial Sequence: Synthetic peptide
GLKSPLRSQA

SEQ ID NO: 620 - protein, 9 aa, Artificial Sequence
  Description of Artificial Sequence: Synthetic peptide
GLRNRICPL

SEQ ID NO: 621 - protein, 10 aa, Artificial Sequence
  Description of Artificial Sequence: Synthetic peptide
GLRNRICPLS

SEQ ID NO: 622 - protein, 9 aa, Artificial Sequence
  Description of Artificial Sequence: Synthetic peptide
GLRSHTYLR

SEQ ID NO: 623 - protein, 10 aa, Artificial Sequence
  Description of Artificial Sequence: Synthetic peptide
GLRSHTYLRR

SEQ ID NO: 624 - protein, 10 aa, Artificial Sequence
  Description of Artificial Sequence: Synthetic peptide
GLRSRTCPPG

SEQ ID NO: 625 - protein, 10 aa, Artificial Sequence
  Description of Artificial Sequence: Synthetic peptide
HACPPGLRNR

SEQ ID NO: 626 - protein, 10 aa, Artificial Sequence
  Description of Artificial Sequence: Synthetic peptide
HAYALCLRSH

SEQ ID NO: 627 - protein, 10 aa, Artificial Sequence
  Description of Artificial Sequence: Synthetic peptide
HHLRTHLLPH

SEQ ID NO: 628 - protein, 9 aa, Artificial Sequence
  Description of Artificial Sequence: Synthetic peptide
HLGSHPCRL

SEQ ID NO: 629 - protein, 10 aa, Artificial Sequence
  Description of Artificial Sequence: Synthetic peptide
HLLPHHRRTR

SEQ ID NO: 630 - protein, 9 aa, Artificial Sequence
  Description of Artificial Sequence: Synthetic peptide
HLRLHASPH

SEQ ID NO: 631 - protein, 10 aa, Artificial Sequence
  Description of Artificial Sequence: Synthetic peptide
HLRLHASPHH

SEQ ID NO: 632 - protein, 9 aa, Artificial Sequence
  Description of Artificial Sequence: Synthetic peptide
HLRSCPCSL

SEQ ID NO: 633 - protein, 9 aa, Artificial Sequence
  Description of Artificial Sequence: Synthetic peptide
HLRTHLLPH

SEQ ID NO: 634 - protein, 10 aa, Artificial Sequence
  Description of Artificial Sequence: Synthetic peptide
HLRTHLLPHH

SEQ ID NO: 635 - protein, 9 aa, Artificial Sequence
  Description of Artificial Sequence: Synthetic peptide
HLRTPPHPH

SEQ ID NO: 636 - protein, 10 aa, Artificial Sequence
  Description of Artificial Sequence: Synthetic peptide
HLRTPPHPHH

SEQ ID NO: 637 - protein, 9 aa, Artificial Sequence
  Description of Artificial Sequence: Synthetic peptide
HLRYRAYPP

SEQ ID NO: 638 - protein, 10 aa, Artificial Sequence
  Description of Artificial Sequence: Synthetic peptide
HLRYRAYPPC

SEQ ID NO: 639 - protein, 10 aa, Artificial Sequence
  Description of Artificial Sequence: Synthetic peptide
HPCCHYLRSR

SEQ ID NO: 640 - protein, 9 aa, Artificial Sequence
  Description of Artificial Sequence: Synthetic peptide
HPHHLRTHL

SEQ ID NO: 641 - protein, 10 aa, Artificial Sequence
  Description of Artificial Sequence: Synthetic peptide
HPHHLRTHLL

SEQ ID NO: 642 - protein, 10 aa, Artificial Sequence
  Description of Artificial Sequence: Synthetic peptide
HRLRSLPRPL

SEQ ID NO: 643 - protein, 9 aa, Artificial Sequence
  Description of Artificial Sequence: Synthetic peptide
HTYLRRLRS

SEQ ID NO: 644 - protein, 10 aa, Artificial Sequence
  Description of Artificial Sequence: Synthetic peptide
HTYLRRLRSH

SEQ ID NO: 645 - protein, 9 aa, Artificial Sequence
  Description of Artificial Sequence: Synthetic peptide
HYLRSRNSA

SEQ ID NO: 646 - protein, 10 aa, Artificial Sequence
  Description of Artificial Sequence: Synthetic peptide
KSPLRSQANA

SEQ ID NO: 647 - protein, 9 aa, Artificial Sequence
  Description of Artificial Sequence: Synthetic peptide
LESQPCLSL

SEQ ID NO: 648 - protein, 10 aa, Artificial Sequence
  Description of Artificial Sequence: Synthetic peptide
LHLRLHASPH

SEQ ID NO: 649 - protein, 10 aa, Artificial Sequence
  Description of Artificial Sequence: Synthetic peptide
LHLRSCPCSL

SEQ ID NO: 650 - protein, 9 aa, Artificial Sequence
  Description of Artificial Sequence: Synthetic peptide
LLPHHRRTR

SEQ ID NO: 651 - protein, 10 aa, Artificial Sequence
  Description of Artificial Sequence: Synthetic peptide
LPCPHRLRSL

SEQ ID NO: 652 - protein, 9 aa, Artificial Sequence
  Description of Artificial Sequence: Synthetic peptide
LPHHRRTRS

SEQ ID NO: 653 - protein, 10 aa, Artificial Sequence
  Description of Artificial Sequence: Synthetic peptide
LPHHRRTRSC

SEQ ID NO: 654 - protein, 9 aa, Artificial Sequence
  Description of Artificial Sequence: Synthetic peptide
LPLGNHPYL

SEQ ID NO: 655 - protein, 9 aa, Artificial Sequence
  Description of Artificial Sequence: Synthetic peptide
LPRPLHLRL

SEQ ID NO: 656 - protein, 10 aa, Artificial Sequence
  Description of Artificial Sequence: Synthetic peptide
LRLHASPHHL

SEQ ID NO: 657 - protein, 10 aa, Artificial Sequence
  Description of Artificial Sequence: Synthetic peptide
LRNCTCPPRL

SEQ ID NO: 658 - protein, 10 aa, Artificial Sequence
  Description of Artificial Sequence: Synthetic peptide
LRNHTCPPSL

SEQ ID NO: 659 - protein, 10 aa, Artificial Sequence
  Description of Artificial Sequence: Synthetic peptide
LRNRICPLSL

SEQ ID NO: 660 - protein, 10 aa, Artificial Sequence
  Description of Artificial Sequence: Synthetic peptide
LRSCPCSLPL

SEQ ID NO: 661 - protein, 10 aa, Artificial Sequence
  Description of Artificial Sequence: Synthetic peptide
LRSHACPPGL

SEQ ID NO: 662 - protein, 10 aa, Artificial Sequence
  Description of Artificial Sequence: Synthetic peptide
LRSHACPPNL

SEQ ID NO: 663 - protein, 10 aa, Artificial Sequence
  Description of Artificial Sequence: Synthetic peptide
LRSHAYALCL

SEQ ID NO: 664 - protein, 10 aa, Artificial Sequence
  Description of Artificial Sequence: Synthetic peptide
LRSHTCPPRL

SEQ ID NO: 665 - protein, 10 aa, Artificial Sequence
  Description of Artificial Sequence: Synthetic peptide
LRSHTCPPSL

SEQ ID NO: 666 - protein, 10 aa, Artificial Sequence
  Description of Artificial Sequence: Synthetic peptide
LRSHTYLRRL

SEQ ID NO: 667 - protein, 10 aa, Artificial Sequence
  Description of Artificial Sequence: Synthetic peptide
LRSLPRPLHL

SEQ ID NO: 668 - protein, 10 aa, Artificial Sequence
  Description of Artificial Sequence: Synthetic peptide
LRSQANALHL

SEQ ID NO: 669 - protein, 10 aa, Artificial Sequence
  Description of Artificial Sequence: Synthetic peptide
LRTPPHPHHL

SEQ ID NO: 670 - protein, 10 aa, Artificial Sequence
  Description of Artificial Sequence: Synthetic peptide
LRYRAYPPCL

SEQ ID NO: 671 - protein, 10 aa, Artificial Sequence
  Description of Artificial Sequence: Synthetic peptide
LSLGNHLCPL

SEQ ID NO: 672 - protein, 10 aa, Artificial Sequence
  Description of Artificial Sequence: Synthetic peptide
LSLRSHPCPL

SEQ ID NO: 673 - protein, 10 aa, Artificial Sequence
  Description of Artificial Sequence: Synthetic peptide
LWCHACLHRL

SEQ ID NO: 674 - protein, 9 aa, Artificial Sequence
  Description of Artificial Sequence: Synthetic peptide
MSPHLRYRA

SEQ ID NO: 675 - protein, 10 aa, Artificial Sequence
  Description of Artificial Sequence: Synthetic peptide
MSPHLRYRAY

SEQ ID NO: 676 - protein, 9 aa, Artificial Sequence
  Description of Artificial Sequence: Synthetic peptide
NLPCPHRLR

SEQ ID NO: 677 - protein, 9 aa, Artificial Sequence
  Description of Artificial Sequence: Synthetic peptide
NLRNHTCPP

SEQ ID NO: 678 - protein, 9 aa, Artificial Sequence
  Description of Artificial Sequence: Synthetic peptide
PMSPHLRYR

SEQ ID NO: 679 - protein, 10 aa, Artificial Sequence
  Description of Artificial Sequence: Synthetic peptide
PPRLRSRTCL

SEQ ID NO: 680 - protein, 9 aa, Artificial Sequence
  Description of Artificial Sequence: Synthetic peptide
PPSLRSHAY

SEQ ID NO: 681 - protein, 10 aa, Artificial Sequence
  Description of Artificial Sequence: Synthetic peptide
RAYPPCLWCH

SEQ ID NO: 682 - protein, 9 aa, Artificial Sequence
  Description of Artificial Sequence: Synthetic peptide
RDHICPLSL

SEQ ID NO: 683 - protein, 9 aa, Artificial Sequence
  Description of Artificial Sequence: Synthetic peptide
RGRTCHPGL

SEQ ID NO: 684 - protein, 10 aa, Artificial Sequence
  Description of Artificial Sequence: Synthetic peptide
RGRTCHPGLR

SEQ ID NO: 685 - protein, 9 aa, Artificial Sequence
  Description of Artificial Sequence: Synthetic peptide
RLHASPHHL

SEQ ID NO: 686 - protein, 10 aa, Artificial Sequence
  Description of Artificial Sequence: Synthetic peptide
RLHASPHHLR

SEQ ID NO: 687 - protein, 9 aa, Artificial Sequence
  Description of Artificial Sequence: Synthetic peptide
RLRDHICPL

SEQ ID NO: 688 - protein, 10 aa, Artificial Sequence
  Description of Artificial Sequence: Synthetic peptide
RLRDHICPLS

SEQ ID NO: 689 - protein, 9 aa, Artificial Sequence
  Description of Artificial Sequence: Synthetic peptide
RLRNLPCPH

SEQ ID NO: 690 - protein, 10 aa, Artificial Sequence
  Description of Artificial Sequence: Synthetic peptide
RLRNLPCPHR

SEQ ID NO: 691 - protein, 9 aa, Artificial Sequence
  Description of Artificial Sequence: Synthetic peptide
RLRSHTCPP

SEQ ID NO: 692 - protein, 10 aa, Artificial Sequence
  Description of Artificial Sequence: Synthetic peptide
RLRSHTCPPS

SEQ ID NO: 693 - protein, 9 aa, Artificial Sequence
  Description of Artificial Sequence: Synthetic peptide
RLRSLPRPL

SEQ ID NO: 694 - protein, 10 aa, Artificial Sequence
  Description of Artificial Sequence: Synthetic peptide
RLRSLPRPLH

SEQ ID NO: 695 - protein, 9 aa, Artificial Sequence
  Description of Artificial Sequence: Synthetic peptide
RLRSRTCLL

SEQ ID NO: 696 - protein, 10 aa, Artificial Sequence
  Description of Artificial Sequence: Synthetic peptide
RLRSRTCLLC

SEQ ID NO: 697 - protein, 10 aa, Artificial Sequence
  Description of Artificial Sequence: Synthetic peptide
RLSPCLWCHA

SEQ ID NO: 698 - protein, 9 aa, Artificial Sequence
  Description of Artificial Sequence: Synthetic peptide
RNHTCPPSL

SEQ ID NO: 699 - protein, 10 aa, Artificial Sequence
  Description of Artificial Sequence: Synthetic peptide
RNHTCPPSLR

SEQ ID NO: 700 - protein, 10 aa, Artificial Sequence
  Description of Artificial Sequence: Synthetic peptide
RNLPCPHRLR

SEQ ID NO: 701 - protein, 9 aa, Artificial Sequence
  Description of Artificial Sequence: Synthetic peptide
RNRICPLSL

SEQ ID NO: 702 - protein, 10 aa, Artificial Sequence
  Description of Artificial Sequence: Synthetic peptide
RNRICPLSLR

SEQ ID NO: 703 - protein, 9 aa, Artificial Sequence
  Description of Artificial Sequence: Synthetic peptide
RPLHLRLHA

SEQ ID NO: 704 - protein, 10 aa, Artificial Sequence
  Description of Artificial Sequence: Synthetic peptide
RPLHLRLHAS

SEQ ID NO: 705 - protein, 10 aa, Artificial Sequence
  Description of Artificial Sequence: Synthetic peptide
RSCPCRWRSH

SEQ ID NO: 706 - protein, 9 aa, Artificial Sequence
  Description of Artificial Sequence: Synthetic peptide
RSCPCSLPL

SEQ ID NO: 707 - protein, 9 aa, Artificial Sequence
  Description of Artificial Sequence: Synthetic peptide
RSHACPPGL

SEQ ID NO: 708 - protein, 10 aa, Artificial Sequence
  Description of Artificial Sequence: Synthetic peptide
RSHACPPGLR

SEQ ID NO: 709 - protein, 9 aa, Artificial Sequence
  Description of Artificial Sequence: Synthetic peptide
RSHACPPNL

SEQ ID NO: 710 - protein, 10 aa, Artificial Sequence
  Description of Artificial Sequence: Synthetic peptide
RSHACPPNLR

SEQ ID NO: 711 - protein, 9 aa, Artificial Sequence
  Description of Artificial Sequence: Synthetic peptide
RSHAYALCL

SEQ ID NO: 712 - protein, 10 aa, Artificial Sequence
  Description of Artificial Sequence: Synthetic peptide
RSHAYALCLR

SEQ ID NO: 713 - protein, 9 aa, Artificial Sequence
  Description of Artificial Sequence: Synthetic peptide
RSHPCCHYL

SEQ ID NO: 714 - protein, 10 aa, Artificial Sequence
  Description of Artificial Sequence: Synthetic peptide
RSHPCCHYLR

SEQ ID NO: 715 - protein, 9 aa, Artificial Sequence
  Description of Artificial Sequence: Synthetic peptide
RSHPCPLGL

SEQ ID NO: 716 - protein, 10 aa, Artificial Sequence
  Description of Artificial Sequence: Synthetic peptide
RSHPCPLGLK

SEQ ID NO: 717 - protein, 9 aa, Artificial Sequence
  Description of Artificial Sequence: Synthetic peptide
RSHTCPPRL

SEQ ID NO: 718 - protein, 10 aa, Artificial Sequence
  Description of Artificial Sequence: Synthetic peptide
RSHTCPPRLR

SEQ ID NO: 719 - protein, 9 aa, Artificial Sequence
  Description of Artificial Sequence: Synthetic peptide
RSHTCPPSL

SEQ ID NO: 720 - protein, 10 aa, Artificial Sequence
  Description of Artificial Sequence: Synthetic peptide
RSHTCPPSLR

SEQ ID NO: 721 - protein, 9 aa, Artificial Sequence
  Description of Artificial Sequence: Synthetic peptide
RSHTYLRRL

SEQ ID NO: 722 - protein, 10 aa, Artificial Sequence
  Description of Artificial Sequence: Synthetic peptide
RSHTYLRRLR

SEQ ID NO: 723 - protein, 9 aa, Artificial Sequence
  Description of Artificial Sequence: Synthetic peptide
RSLPRPLHL

SEQ ID NO: 724 - protein, 10 aa, Artificial Sequence
  Description of Artificial Sequence: Synthetic peptide
RSLPRPLHLR

SEQ ID NO: 725 - protein, 9 aa, Artificial Sequence
  Description of Artificial Sequence: Synthetic peptide
RSQANALHL

SEQ ID NO: 726 - protein, 10 aa, Artificial Sequence
  Description of Artificial Sequence: Synthetic peptide
RSQANALHLR

SEQ ID NO: 727 - protein, 9 aa, Artificial Sequence
  Description of Artificial Sequence: Synthetic peptide
RSRNSAPGP

SEQ ID NO: 728 - protein, 10 aa, Artificial Sequence
  Description of Artificial Sequence: Synthetic peptide
RSRNSAPGPR

SEQ ID NO: 729 - protein, 9 aa, Artificial Sequence
  Description of Artificial Sequence: Synthetic peptide
RSRTCLLCL

SEQ ID NO: 730 - protein, 10 aa, Artificial Sequence
  Description of Artificial Sequence: Synthetic peptide
RSRTCLLCLR

SEQ ID NO: 731 - protein, 9 aa, Artificial Sequence
  Description of Artificial Sequence: Synthetic peptide
RSRTCPPGL

SEQ ID NO: 732 - protein, 10 aa, Artificial Sequence
  Description of Artificial Sequence: Synthetic peptide
RSRTCPPGLR

SEQ ID NO: 733 - protein, 10 aa, Artificial Sequence
  Description of Artificial Sequence: Synthetic peptide
RTCHPGLRSR

SEQ ID NO: 734 - protein, 9 aa, Artificial Sequence
  Description of Artificial Sequence: Synthetic peptide
RTHLLPHHR

SEQ ID NO: 735 - protein, 10 aa, Artificial Sequence
  Description of Artificial Sequence: Synthetic peptide
RTHLLPHHRR

SEQ ID NO: 736 - protein, 9 aa, Artificial Sequence
  Description of Artificial Sequence: Synthetic peptide
RTPPHPHHL

SEQ ID NO: 737 - protein, 10 aa, Artificial Sequence
  Description of Artificial Sequence: Synthetic peptide
RTPPHPHHLR

SEQ ID NO: 738 - protein, 9 aa, Artificial Sequence
  Description of Artificial Sequence: Synthetic peptide
RTRSCPCRW

SEQ ID NO: 739 - protein, 10 aa, Artificial Sequence
  Description of Artificial Sequence: Synthetic peptide
RTRSCPCRWR

SEQ ID NO: 740 - protein, 9 aa, Artificial Sequence
  Description of Artificial Sequence: Synthetic peptide
RWRSHPCCH

SEQ ID NO: 741 - protein, 10 aa, Artificial Sequence
  Description of Artificial Sequence: Synthetic peptide
RWRSHPCCHY

SEQ ID NO: 742 - protein, 9 aa, Artificial Sequence
  Description of Artificial Sequence: Synthetic peptide
RYRAYPPCL

SEQ ID NO: 743 - protein, 10 aa, Artificial Sequence
  Description of Artificial Sequence: Synthetic peptide
RYRAYPPCLW

SEQ ID NO: 744 - protein, 9 aa, Artificial Sequence
  Description of Artificial Sequence: Synthetic peptide
SHAYALCLR

SEQ ID NO: 745 - protein, 9 aa, Artificial Sequence
  Description of Artificial Sequence: Synthetic peptide
SLGNHLCPL

SEQ ID NO: 746 - protein, 9 aa, Artificial Sequence
  Description of Artificial Sequence: Synthetic peptide
SLPLGNHPY

SEQ ID NO: 747 - protein, 10 aa, Artificial Sequence
  Description of Artificial Sequence: Synthetic peptide
SLPLGNHPYL

SEQ ID NO: 748 - protein, 9 aa, Artificial Sequence
  Description of Artificial Sequence: Synthetic peptide
SLPRPLHLR

SEQ ID NO: 749 - protein, 10 aa, Artificial Sequence
  Description of Artificial Sequence: Synthetic peptide
SLPRPLHLRL

SEQ ID NO: 750 - protein, 10 aa, Artificial Sequence
  Description of Artificial Sequence: Synthetic peptide
SLRNCTCPPR

SEQ ID NO: 751 - protein, 10 aa, Artificial Sequence
  Description of Artificial Sequence: Synthetic peptide
SLRSHACPPG

SEQ ID NO: 752 - protein, 9 aa, Artificial Sequence
  Description of Artificial Sequence: Synthetic peptide
SLRSHAYAL

SEQ ID NO: 753 - protein, 10 aa, Artificial Sequence
  Description of Artificial Sequence: Synthetic peptide
SLRSHAYALC

SEQ ID NO: 754 - protein, 9 aa, Artificial Sequence
  Description of Artificial Sequence: Synthetic peptide
SLRSHPCPL

SEQ ID NO: 755 - protein, 10 aa, Artificial Sequence
  Description of Artificial Sequence: Synthetic peptide
SLRSHPCPLG

SEQ ID NO: 756 - protein, 9 aa, Artificial Sequence
  Description of Artificial Sequence: Synthetic peptide
SPHHLRTPP

SEQ ID NO: 757 - protein, 10 aa, Artificial Sequence
  Description of Artificial Sequence: Synthetic peptide
SPHHLRTPPH

SEQ ID NO: 758 - protein, 9 aa, Artificial Sequence
  Description of Artificial Sequence: Synthetic peptide
SPHLRYRAY

SEQ ID NO: 759 - protein, 10 aa, Artificial Sequence
  Description of Artificial Sequence: Synthetic peptide
SPLRSQANAL

SEQ ID NO: 760 - protein, 9 aa, Artificial Sequence
  Description of Artificial Sequence: Synthetic peptide
SPMSPHLRY

SEQ ID NO: 761 - protein, 10 aa, Artificial Sequence
  Description of Artificial Sequence: Synthetic peptide
SPMSPHLRYR

SEQ ID NO: 762 - protein, 9 aa, Artificial Sequence
  Description of Artificial Sequence: Synthetic peptide
SQANALHLR

SEQ ID NO: 763 - protein, 10 aa, Artificial Sequence
  Description of Artificial Sequence: Synthetic peptide
SQANALHLRS

SEQ ID NO: 764 - protein, 9 aa, Artificial Sequence
  Description of Artificial Sequence: Synthetic peptide
VSRLSPCLW

SEQ ID NO: 765 - protein, 9 aa, Artificial Sequence
  Description of Artificial Sequence: Synthetic peptide
WRSHPCCHY

SEQ ID NO: 766 - protein, 10 aa, Artificial Sequence
  Description of Artificial Sequence: Synthetic peptide
WRSHPCCHYL

SEQ ID NO: 767 - protein, 10 aa, Artificial Sequence
  Description of Artificial Sequence: Synthetic peptide
YLPCLESQPC

SEQ ID NO: 768 - protein, 10 aa, Artificial Sequence
  Description of Artificial Sequence: Synthetic peptide
YLRRLRSHTC

SEQ ID NO: 769 - protein, 9 aa, Artificial Sequence
  Description of Artificial Sequence: Synthetic peptide
YLRSRNSAP

SEQ ID NO: 770 - protein, 10 aa, Artificial Sequence
  Description of Artificial Sequence: Synthetic peptide
YLRSRNSAPG

SEQ ID NO: 771 - protein, 9 aa, Artificial Sequence
  Description of Artificial Sequence: Synthetic peptide
KMLKRTKCF

SEQ ID NO: 772 - protein, 9 aa, Artificial Sequence
  Description of Artificial Sequence: Synthetic peptide
MLKRTKCFT

SEQ ID NO: 773 - protein, 9 aa, Artificial Sequence
  Description of Artificial Sequence: Synthetic peptide
LKRTKCFTF

SEQ ID NO: 774 - protein, 10 aa, Artificial Sequence
  Description of Artificial Sequence: Synthetic peptide
MLKRTKCFTF

SEQ ID NO: 775 - protein, 10 aa, Artificial Sequence
  Description of Artificial Sequence: Synthetic peptide
KQNKMLKRTK

SEQ ID NO: 776 - protein, 10 aa, Artificial Sequence
  Description of Artificial Sequence: Synthetic peptide
KMLKRTKCFT

SEQ ID NO: 777 - protein, 10 aa, Artificial Sequence
  Description of Artificial Sequence: Synthetic peptide
NKMLKRTKCF

SEQ ID NO: 778 - protein, 10 aa, Artificial Sequence
  Description of Artificial Sequence: Synthetic peptide
APASAPWPST

SEQ ID NO: 779 - protein, 10 aa, Artificial Sequence
  Description of Artificial Sequence: Synthetic peptide
APPWPLHQQL

SEQ ID NO: 780 - protein, 9 aa, Artificial Sequence
  Description of Artificial Sequence: Synthetic peptide
APWPSTSSH

SEQ ID NO: 781 - protein, 10 aa, Artificial Sequence
  Description of Artificial Sequence: Synthetic peptide
ASCILGQPSL

SEQ ID NO: 782 - protein, 10 aa, Artificial Sequence
  Description of Artificial Sequence: Synthetic peptide
ATVSVWASCI

SEQ ID NO: 783 - protein, 10 aa, Artificial Sequence
  Description of Artificial Sequence: Synthetic peptide
CQRLLPPWPL

SEQ ID NO: 784 - protein, 10 aa, Artificial Sequence
  Description of Artificial Sequence: Synthetic peptide
HQPPPGPCHL

SEQ ID NO: 785 - protein, 10 aa, Artificial Sequence
  Description of Artificial Sequence: Synthetic peptide
HQQLLHRRPL

SEQ ID NO: 786 - protein, 10 aa, Artificial Sequence
  Description of Artificial Sequence: Synthetic peptide
IEQWFTEDQV

SEQ ID NO: 787 - protein, 9 aa, Artificial Sequence
  Description of Artificial Sequence: Synthetic peptide
KLPECQRLL

SEQ ID NO: 788 - protein, 10 aa, Artificial Sequence
  Description of Artificial Sequence: Synthetic peptide
KPTRAATVSV

SEQ ID NO: 789 - protein, 10 aa, Artificial Sequence
  Description of Artificial Sequence: Synthetic peptide
KTYQGSYGFV

SEQ ID NO: 790 - protein, 9 aa, Artificial Sequence
  Description of Artificial Sequence: Synthetic peptide
KTYQGSYVS

SEQ ID NO: 791 - protein, 10 aa, Artificial Sequence
  Description of Artificial Sequence: Synthetic peptide
KTYQGSYVSV

SEQ ID NO: 792 - protein, 10 aa, Artificial Sequence
  Description of Artificial Sequence: Synthetic peptide
LLSLPRKPTR

SEQ ID NO: 793 - protein, 10 aa, Artificial Sequence
  Description of Artificial Sequence: Synthetic peptide
LPPWPLHQQL

SEQ ID NO: 794 - protein, 9 aa, Artificial Sequence
  Description of Artificial Sequence: Synthetic peptide
LPRKPTRAA

SEQ ID NO: 795 - protein, 10 aa, Artificial Sequence
  Description of Artificial Sequence: Synthetic peptide
LPRKPTRAAT

SEQ ID NO: 796 - protein, 9 aa, Artificial Sequence
  Description of Artificial Sequence: Synthetic peptide
LSLPRKPTR

SEQ ID NO: 797 - protein, 9 aa, Artificial Sequence
  Description of Artificial Sequence: Synthetic peptide
MKLPECQRL

SEQ ID NO: 798 - protein, 10 aa, Artificial Sequence
  Description of Artificial Sequence: Synthetic peptide
MKLPECQRLL

SEQ ID NO: 799 - protein, 10 aa, Artificial Sequence
  Description of Artificial Sequence: Synthetic peptide
MPEAAPPWPL

SEQ ID NO: 800 - protein, 9 aa, Artificial Sequence
  Description of Artificial Sequence: Synthetic peptide
PEAAPPWPL

SEQ ID NO: 801 - protein, 9 aa, Artificial Sequence
  Description of Artificial Sequence: Synthetic peptide
PTRAATVSV

SEQ ID NO: 802 - protein, 9 aa, Artificial Sequence
  Description of Artificial Sequence: Synthetic peptide
QMKLPECQR

SEQ ID NO: 803 - protein, 9 aa, Artificial Sequence
  Description of Artificial Sequence: Synthetic peptide
QQLLHRRPL

SEQ ID NO: 804 - protein, 10 aa, Artificial Sequence
  Description of Artificial Sequence: Synthetic peptide
QQLLHRRPLH

SEQ ID NO: 805 - protein, 9 aa, Artificial Sequence
  Description of Artificial Sequence: Synthetic peptide
QRLLPPWPL

SEQ ID NO: 806 - protein, 10 aa, Artificial Sequence
  Description of Artificial Sequence: Synthetic peptide
QWFTEDQVQM

SEQ ID NO: 807 - protein, 9 aa, Artificial Sequence
  Description of Artificial Sequence: Synthetic peptide
RAATVSVWA

SEQ ID NO: 808 - protein, 9 aa, Artificial Sequence
  Description of Artificial Sequence: Synthetic peptide
RLLPPWPLH

SEQ ID NO: 809 - protein, 9 aa, Artificial Sequence
  Description of Artificial Sequence: Synthetic peptide
RMPEAAPPW

SEQ ID NO: 810 - protein, 9 aa, Artificial Sequence
  Description of Artificial Sequence: Synthetic peptide
RPAPASAPW

SEQ ID NO: 811 - protein, 9 aa, Artificial Sequence
  Description of Artificial Sequence: Synthetic peptide
SLPRKPTRA

SEQ ID NO: 812 - protein, 10 aa, Artificial Sequence
  Description of Artificial Sequence: Synthetic peptide
SLPRKPTRAA

SEQ ID NO: 813 - protein, 10 aa, Artificial Sequence
  Description of Artificial Sequence: Synthetic peptide
SQKTYQGSYV

SEQ ID NO: 814 - protein, 10 aa, Artificial Sequence
  Description of Artificial Sequence: Synthetic peptide
STPRPAPASA

SEQ ID NO: 815 - protein, 9 aa, Artificial Sequence
  Description of Artificial Sequence: Synthetic peptide
SYGFVWASC

SEQ ID NO: 816 - protein, 10 aa, Artificial Sequence
  Description of Artificial Sequence: Synthetic peptide
SYGFVWASCI

SEQ ID NO: 817 - protein, 9 aa, Artificial Sequence
  Description of Artificial Sequence: Synthetic peptide
SYVSVWASC

SEQ ID NO: 818 - protein, 10 aa, Artificial Sequence
  Description of Artificial Sequence: Synthetic peptide
SYVSVWASCI

SEQ ID NO: 819 - protein, 9 aa, Artificial Sequence
  Description of Artificial Sequence: Synthetic peptide
TEDQVQMKL

SEQ ID NO: 820 - protein, 9 aa, Artificial Sequence
  Description of Artificial Sequence: Synthetic peptide
TPRPAPASA

SEQ ID NO: 821 - protein, 10 aa, Artificial Sequence
  Description of Artificial Sequence: Synthetic peptide
TPRPAPASAP

SEQ ID NO: 822 - protein, 9 aa, Artificial Sequence
  Description of Artificial Sequence: Synthetic peptide
TRAATVSVW

SEQ ID NO: 823 - protein, 9 aa, Artificial Sequence
  Description of Artificial Sequence: Synthetic peptide
TVSVWASCI

SEQ ID NO: 824 - protein, 10 aa, Artificial Sequence
  Description of Artificial Sequence: Synthetic peptide
TVSVWASCIL

SEQ ID NO: 825 - protein, 9 aa, Artificial Sequence
  Description of Artificial Sequence: Synthetic peptide
TYQGSYGFV

SEQ ID NO: 826 - protein, 10 aa, Artificial Sequence
  Description of Artificial Sequence: Synthetic peptide
TYQGSYGFVW

SEQ ID NO: 827 - protein, 9 aa, Artificial Sequence
  Description of Artificial Sequence: Synthetic peptide
TYQGSYVSV

SEQ ID NO: 828 - protein, 10 aa, Artificial Sequence
  Description of Artificial Sequence: Synthetic peptide
TYQGSYVSVW

SEQ ID NO: 829 - protein, 9 aa, Artificial Sequence
  Description of Artificial Sequence: Synthetic peptide
VSVWASCIL

SEQ ID NO: 830 - protein, 9 aa, Artificial Sequence
  Description of Artificial Sequence: Synthetic peptide
WPLHQQLLH

SEQ ID NO: 831 - protein, 9 aa, Artificial Sequence
  Description of Artificial Sequence: Synthetic peptide
WPSTSSHST

SEQ ID NO: 832 - protein, 9 aa, Artificial Sequence
  Description of Artificial Sequence: Synthetic peptide
YGFVWASCI

SEQ ID NO: 833 - protein, 10 aa, Artificial Sequence
  Description of Artificial Sequence: Synthetic peptide
YGFVWASCIL

SEQ ID NO: 834 - protein, 9 aa, Artificial Sequence
  Description of Artificial Sequence: Synthetic peptide
YQGSYGFVW

SEQ ID NO: 835 - protein, 10 aa, Artificial Sequence
  Description of Artificial Sequence: Synthetic peptide
YQGSYGFVWA

SEQ ID NO: 836 - protein, 9 aa, Artificial Sequence
  Description of Artificial Sequence: Synthetic peptide
YQGSYVSVW

SEQ ID NO: 837 - protein, 10 aa, Artificial Sequence
  Description of Artificial Sequence: Synthetic peptide
YQGSYVSVWA

SEQ ID NO: 838 - protein, 9 aa, Artificial Sequence
  Description of Artificial Sequence: Synthetic peptide
YVSVWASCI

SEQ ID NO: 839 - protein, 10 aa, Artificial Sequence
  Description of Artificial Sequence: Synthetic peptide
YVSVWASCIL

SEQ ID NO: 840 - protein, 10 aa, Artificial Sequence
  Description of Artificial Sequence: Synthetic peptide
CHLSMLTDSL

SEQ ID NO: 841 - protein, 9 aa, Artificial Sequence
  Description of Artificial Sequence: Synthetic peptide
EMQGHTMGF

SEQ ID NO: 842 - protein, 9 aa, Artificial Sequence
  Description of Artificial Sequence: Synthetic peptide
FLPISHCQC

SEQ ID NO: 843 - protein, 10 aa, Artificial Sequence
  Description of Artificial Sequence: Synthetic peptide
FLPISHCQCI

SEQ ID NO: 844 - protein, 10 aa, Artificial Sequence
  Description of Artificial Sequence: Synthetic peptide
FRDAGHTMGF

SEQ ID NO: 845 - protein, 9 aa, Artificial Sequence
  Description of Artificial Sequence: Synthetic peptide
FWLTKLNYL

SEQ ID NO: 846 - protein, 9 aa, Artificial Sequence
  Description of Artificial Sequence: Synthetic peptide
GFWLTKLNY

SEQ ID NO: 847 - protein, 10 aa, Artificial Sequence
  Description of Artificial Sequence: Synthetic peptide
GFWLTKLNYL

SEQ ID NO: 848 - protein, 10 aa, Artificial Sequence
  Description of Artificial Sequence: Synthetic peptide
GSSEMQGHTM

SEQ ID NO: 849 - protein, 9 aa, Artificial Sequence
  Description of Artificial Sequence: Synthetic peptide
HLSMLTDSL

SEQ ID NO: 850 - protein, 10 aa, Artificial Sequence
  Description of Artificial Sequence: Synthetic peptide
HLSMLTDSLF

SEQ ID NO: 851 - protein, 10 aa, Artificial Sequence
  Description of Artificial Sequence: Synthetic peptide
HSYRGHLGSS

SEQ ID NO: 852 - protein, 9 aa, Artificial Sequence
  Description of Artificial Sequence: Synthetic peptide
HTMGFWLTK

SEQ ID NO: 853 - protein, 10 aa, Artificial Sequence
  Description of Artificial Sequence: Synthetic peptide
HTMGFWLTKL

SEQ ID NO: 854 - protein, 10 aa, Artificial Sequence
  Description of Artificial Sequence: Synthetic peptide
KERCLQLSGA

SEQ ID NO: 855 - protein, 10 aa, Artificial Sequence
  Description of Artificial Sequence: Synthetic peptide
KLNYLCHLSM

SEQ ID NO: 856 - protein, 9 aa, Artificial Sequence
  Description of Artificial Sequence: Synthetic peptide
LFRDAGHTM

SEQ ID NO: 857 - protein, 9 aa, Artificial Sequence
  Description of Artificial Sequence: Synthetic peptide
LNYLCHLSM

SEQ ID NO: 858 - protein, 10 aa, Artificial Sequence
  Description of Artificial Sequence: Synthetic peptide
LNYLCHLSML

SEQ ID NO: 859 - protein, 9 aa, Artificial Sequence
  Description of Artificial Sequence: Synthetic peptide
LPISHCQCI

SEQ ID NO: 860 - protein, 10 aa, Artificial Sequence
  Description of Artificial Sequence: Synthetic peptide
LPISHCQCIL

SEQ ID NO: 861 - protein, 9 aa, Artificial Sequence
  Description of Artificial Sequence: Synthetic peptide
LSMLTDSLF

SEQ ID NO: 862 - protein, 10 aa, Artificial Sequence
  Description of Artificial Sequence: Synthetic peptide
LSMLTDSLFL

SEQ ID NO: 863 - protein, 9 aa, Artificial Sequence
  Description of Artificial Sequence: Synthetic peptide
LTDSLFLPI

SEQ ID NO: 864 - protein, 10 aa, Artificial Sequence
  Description of Artificial Sequence: Synthetic peptide
LTKLNYLCHL

SEQ ID NO: 865 - protein, 10 aa, Artificial Sequence
  Description of Artificial Sequence: Synthetic peptide
MGFWLTKLNY

SEQ ID NO: 866 - protein, 10 aa, Artificial Sequence
  Description of Artificial Sequence: Synthetic peptide
MLTDSLFLPI

SEQ ID NO: 867 - protein, 9 aa, Artificial Sequence
  Description of Artificial Sequence: Synthetic peptide
MQGHTMGFW

SEQ ID NO: 868 - protein, 10 aa, Artificial Sequence
  Description of Artificial Sequence: Synthetic peptide
MQGHTMGFWL

SEQ ID NO: 869 - protein, 9 aa, Artificial Sequence
  Description of Artificial Sequence: Synthetic peptide
NYLCHLSML

SEQ ID NO: 870 - protein, 9 aa, Artificial Sequence
  Description of Artificial Sequence: Synthetic peptide
RDAGHTMGF

SEQ ID NO: 871 - protein, 10 aa, Artificial Sequence
  Description of Artificial Sequence: Synthetic peptide
RDAGHTMGFW

SEQ ID NO: 872 - protein, 9 aa, Artificial Sequence
  Description of Artificial Sequence: Synthetic peptide
RGHLGSSEM

SEQ ID NO: 873 - protein, 10 aa, Artificial Sequence
  Description of Artificial Sequence: Synthetic peptide
RIHSYRGHLG

SEQ ID NO: 874 - protein, 9 aa, Artificial Sequence
  Description of Artificial Sequence: Synthetic peptide
SEMQGHTMG

SEQ ID NO: 875 - protein, 10 aa, Artificial Sequence
  Description of Artificial Sequence: Synthetic peptide
SEMQGHTMGF

SEQ ID NO: 876 - protein, 9 aa, Artificial Sequence
  Description of Artificial Sequence: Synthetic peptide
SLFLPISHC

SEQ ID NO: 877 - protein, 9 aa, Artificial Sequence
  Description of Artificial Sequence: Synthetic peptide
SMLTDSLFL

SEQ ID NO: 878 - protein, 9 aa, Artificial Sequence
  Description of Artificial Sequence: Synthetic peptide
SSEMQGHTM

SEQ ID NO: 879 - protein, 9 aa, Artificial Sequence
  Description of Artificial Sequence: Synthetic peptide
TKLNYLCHL

SEQ ID NO: 880 - protein, 9 aa, Artificial Sequence
  Description of Artificial Sequence: Synthetic peptide
TLKERCLQL

SEQ ID NO: 881 - protein, 9 aa, Artificial Sequence
  Description of Artificial Sequence: Synthetic peptide
TMGFWLTKL

SEQ ID NO: 882 - protein, 9 aa, Artificial Sequence
  Description of Artificial Sequence: Synthetic peptide
WLFRDAGHT

SEQ ID NO: 883 - protein, 10 aa, Artificial Sequence
  Description of Artificial Sequence: Synthetic peptide
WLFRDAGHTM

SEQ ID NO: 884 - protein, 9 aa, Artificial Sequence
  Description of Artificial Sequence: Synthetic peptide
YLCHLSMLT

SEQ ID NO: 885 - protein, 10 aa, Artificial Sequence
  Description of Artificial Sequence: Synthetic peptide
YRGHLGSSEM

SEQ ID NO: 886 - protein, 14 aa, Artificial Sequence
  Description of Artificial Sequence: Synthetic peptide
QYIKANSKFIGITE

SEQ ID NO: 887 - protein, 21 aa, Plasmodium falciparum
DIEKKIAKMEKASSVFNVVNS

SEQ ID NO: 888 - protein, 16 aa, Streptococcus sp.
GAVDSILGGVATYGAA

SEQ ID NO: 889 - protein, 13 aa, Artificial Sequence
  Description of Artificial Sequence: Synthetic peptide
  MOD_RES (1)..(1): D-alanine or L-alanine
  MOD_RES (3)..(3): Cyclohexylalanine, phenylalanine, or tyrosine
  MOD_RES (13)..(13): D-alanine or L-alanine
AKXVWANTLKAAA

SEQ ID NO: 890 - protein, 101 aa, Artificial Sequence
  Description of Artificial Sequence: Synthetic polypeptide
VAVKMLKPSAHLTEREALMSELKVLSYLGNHMNIVNLLGACTIGGPTLVIIEYCCYGDLLNFLRRKRDSFICSKQEDHAEAALYKNLLHSKESSCSDSTNE

SEQ ID NO: 891 - protein, 61 aa, Artificial Sequence
  Description of Artificial Sequence: Synthetic polypeptide
HGWRPFLPVRARSRWNRRLDVTVANGRSWKYGWSLLRVPQVNGIQVLNVSLKSSSNVISYE

SEQ ID NO: 892 - protein, 9 aa, Artificial Sequence
  Description of Artificial Sequence: Synthetic peptide
GQYGKVYEG

SEQ ID NO: 893 - protein, 10 aa, Artificial Sequence
  Description of Artificial Sequence: Synthetic peptide
GQYGKVYEGV

SEQ ID NO: 894 - protein, 9 aa, Artificial Sequence
  Description of Artificial Sequence: Synthetic peptide
KLGGGQYGK

SEQ ID NO: 895 - protein, 10 aa, Artificial Sequence
  Description of Artificial Sequence: Synthetic peptide
KLGGGQYGKV

SEQ ID NO: 896 - protein, 9 aa, Artificial Sequence
  Description of Artificial Sequence: Synthetic peptide
KVYEGVWKK

SEQ ID NO: 897 - protein, 10 aa, Artificial Sequence
  Description of Artificial Sequence: Synthetic peptide
KVYEGVWKKY

SEQ ID NO: 898 - protein, 9 aa, Artificial Sequence
  Description of Artificial Sequence: Synthetic peptide
QYGKVYEGV

SEQ ID NO: 899 - protein, 10 aa, Artificial Sequence
  Description of Artificial Sequence: Synthetic peptide
QYGKVYEGVW

SEQ ID NO: 900 - protein, 9 aa, Artificial Sequence
  Description of Artificial Sequence: Synthetic peptide
GQYGVVYEG

SEQ ID NO: 901 - protein, 10 aa, Artificial Sequence
  Description of Artificial Sequence: Synthetic peptide
GQYGVVYEGV

SEQ ID NO: 902 - protein, 9 aa, Artificial Sequence
  Description of Artificial Sequence: Synthetic peptide
KLGGGQYGV

SEQ ID NO: 903 - protein, 10 aa, Artificial Sequence
  Description of Artificial Sequence: Synthetic peptide
KLGGGQYGVV

SEQ ID NO: 904 - protein, 9 aa, Artificial Sequence
  Description of Artificial Sequence: Synthetic peptide
QYGVVYEGV

SEQ ID NO: 905 - protein, 10 aa, Artificial Sequence
  Description of Artificial Sequence: Synthetic peptide
QYGVVYEGVW

SEQ ID NO: 906 - protein, 9 aa, Artificial Sequence
  Description of Artificial Sequence: Synthetic peptide
VVYEGVWKK

SEQ ID NO: 907 - protein, 10 aa, Artificial Sequence
  Description of Artificial Sequence: Synthetic peptide
VVYEGVWKKY

SEQ ID NO: 908 - protein, 10 aa, Artificial Sequence
  Description of Artificial Sequence: Synthetic peptide
ATQISSATEY

SEQ ID NO: 909 - protein, 10 aa, Artificial Sequence
  Description of Artificial Sequence: Synthetic peptide
ISSATEYLEK

SEQ ID NO: 910 - protein, 9 aa, Artificial Sequence
  Description of Artificial Sequence: Synthetic peptide
SSATEYLEK

SEQ ID NO: 911 - protein, 10 aa, Artificial Sequence
  Description of Artificial Sequence: Synthetic peptide
TQISSATEYL

SEQ ID NO: 912 - protein, 10 aa, Artificial Sequence
  Description of Artificial Sequence: Synthetic peptide
YMATQISSAT

SEQ ID NO: 913 - protein, 10 aa, Artificial Sequence
  Description of Artificial Sequence: Synthetic peptide
FYIIIEFMTY

SEQ ID NO: 914 - protein, 10 aa, Artificial Sequence
  Description of Artificial Sequence: Synthetic peptide
IIEFMTYGNL

SEQ ID NO: 915 - protein, 9 aa, Artificial Sequence
  Description of Artificial Sequence: Synthetic peptide
IIIEFMTYG

SEQ ID NO: 916 - protein, 10 aa, Artificial Sequence
  Description of Artificial Sequence: Synthetic peptide
IIIEFMTYGN

SEQ ID NO: 917 - protein, 10 aa, Artificial Sequence
  Description of Artificial Sequence: Synthetic peptide
YIIIEFMTYG

SEQ ID NO: 918 - protein, 10 aa, Artificial Sequence
  Description of Artificial Sequence: Synthetic peptide
GQHGEVYEGV

SEQ ID NO: 919 - protein, 10 aa, Artificial Sequence
  Description of Artificial Sequence: Synthetic peptide
KLGGGQHGEV

SEQ ID NO: 920 - protein, 9 aa, Artificial Sequence
  Description of Artificial Sequence: Synthetic peptide
KIADFGMAR

SEQ ID NO: 921 - protein, 10 aa, Artificial Sequence
  Description of Artificial Sequence: Synthetic peptide
RVAKIADFGM

SEQ ID NO: 922 - protein, 10 aa, Artificial Sequence
  Description of Artificial Sequence: Synthetic peptide
FILMELMAGG

SEQ ID NO: 923 - protein, 9 aa, Artificial Sequence
  Description of Artificial Sequence: Synthetic peptide
ILMELMAGG

SEQ ID NO: 924 - protein, 10 aa, Artificial Sequence
  Description of Artificial Sequence: Synthetic peptide
ILMELMAGGD

SEQ ID NO: 925 - protein, 10 aa, Artificial Sequence
  Description of Artificial Sequence: Synthetic peptide
LMELMAGGDL

SEQ ID NO: 926 - protein, 9 aa, Artificial Sequence
  Description of Artificial Sequence: Synthetic peptide
LPRFILMEL

SEQ ID NO: 927 - protein, 10 aa, Artificial Sequence
  Description of Artificial Sequence: Synthetic peptide
LPRFILMELM

SEQ ID NO: 928 - protein, 10 aa, Artificial Sequence
  Description of Artificial Sequence: Synthetic peptide
LQSLPRFILM

SEQ ID NO: 929 - protein, 10 aa, Artificial Sequence
  Description of Artificial Sequence: Synthetic peptide
SLPRFILMEL

SEQ ID NO: 930 - protein, 9 aa, Artificial Sequence
  Description of Artificial Sequence: Synthetic peptide
LATEKSRWS

SEQ ID NO: 931 - protein, 10 aa, Artificial Sequence
  Description of Artificial Sequence: Synthetic peptide
LATEKSRWSG

SEQ ID NO: 932 - protein, 9 aa, Artificial Sequence
  Description of Artificial Sequence: Synthetic peptide
EYMANGSLL

SEQ ID NO: 933 - protein, 9 aa, Artificial Sequence
  Description of Artificial Sequence: Synthetic peptide
MANGSLLNY

SEQ ID NO: 934 - protein, 10 aa, Artificial Sequence
  Description of Artificial Sequence: Synthetic peptide
MANGSLLNYL

SEQ ID NO: 935 - protein, 9 aa, Artificial Sequence
  Description of Artificial Sequence: Synthetic peptide
SLLNYLREM

SEQ ID NO: 936 - protein, 9 aa, Artificial Sequence
  Description of Artificial Sequence: Synthetic peptide
YMANGSLLN

SEQ ID NO: 937 - protein, 10 aa, Artificial Sequence
  Description of Artificial Sequence: Synthetic peptide
YMANGSLLNY

SEQ ID NO: 938 - protein, 11 aa, Artificial Sequence
  Description of Artificial Sequence: Synthetic peptide
GPPPADLCHAL

SEQ ID NO: 939 - protein, 11 aa, Artificial Sequence
  Description of Artificial Sequence: Synthetic peptide
IIRNRGENSCK

SEQ ID NO: 940 - protein, 10 aa, Artificial Sequence
  Description of Artificial Sequence: Synthetic peptide
CLTSTVQLIM

SEQ ID NO: 941 - protein, 9 aa, Artificial Sequence
  Description of Artificial Sequence: Synthetic peptide
IMQLMPFGC

SEQ ID NO: 942 - protein, 10 aa, Artificial Sequence
  Description of Artificial Sequence: Synthetic peptide
IMQLMPFGCL

SEQ ID NO: 943 - protein, 9 aa, Artificial Sequence
  Description of Artificial Sequence: Synthetic peptide
LIMQLMPFG

SEQ ID NO: 944 - protein, 10 aa, Artificial Sequence
  Description of Artificial Sequence: Synthetic peptide
LIMQLMPFGC

SEQ ID NO: 945 - protein, 9 aa, Artificial Sequence
  Description of Artificial Sequence: Synthetic peptide
LTSTVQLIM

SEQ ID NO: 946 - protein, 9 aa, Artificial Sequence
  Description of Artificial Sequence: Synthetic peptide
MQLMPFGCL

SEQ ID NO: 947 - protein, 10 aa, Artificial Sequence
  Description of Artificial Sequence: Synthetic peptide
MQLMPFGCLL

SEQ ID NO: 948 - protein, 9 aa, Artificial Sequence
  Description of Artificial Sequence: Synthetic peptide
QLIMQLMPF

SEQ ID NO: 949 - protein, 10 aa, Artificial Sequence
  Description of Artificial Sequence: Synthetic peptide
QLIMQLMPFG

SEQ ID NO: 950 - protein, 9 aa, Artificial Sequence
  Description of Artificial Sequence: Synthetic peptide
STVQLIMQL

SEQ ID NO: 951 - protein, 10 aa, Artificial Sequence
  Description of Artificial Sequence: Synthetic peptide
VQLIMQLMPF

SEQ ID NO: 952 - protein, 9 aa, Artificial Sequence
  Description of Artificial Sequence: Synthetic peptide
GLLLEMLDA

SEQ ID NO: 953 - protein, 9 aa, Artificial Sequence
  Description of Artificial Sequence: Synthetic peptide
LYGLLLEML

SEQ ID NO: 954 - protein, 9 aa, Artificial Sequence
  Description of Artificial Sequence: Synthetic peptide
NVVPLYGLL

SEQ ID NO: 955 - protein, 9 aa, Artificial Sequence
  Description of Artificial Sequence: Synthetic peptide
PLYGLLLEM

SEQ ID NO: 956 - protein, 10 aa, Artificial Sequence
  Description of Artificial Sequence: Synthetic peptide
PLYGLLLEML

SEQ ID NO: 957 - protein, 10 aa, Artificial Sequence
  Description of Artificial Sequence: Synthetic peptide
VPLYGLLLEM

SEQ ID NO: 958 - protein, 9 aa, Artificial Sequence
  Description of Artificial Sequence: Synthetic peptide
VVPLYGLLL

SEQ ID NO: 959 - protein, 9 aa, Artificial Sequence
  Description of Artificial Sequence: Synthetic peptide
FLPSTLKSL

SEQ ID NO: 960 - protein, 9 aa, Artificial Sequence
  Description of Artificial Sequence: Synthetic peptide
GVYTFLPST

SEQ ID NO: 961 - protein, 10 aa, Artificial Sequence
  Description of Artificial Sequence: Synthetic peptide
GVYTFLPSTL

SEQ ID NO: 962 - protein, 10 aa, Artificial Sequence
  Description of Artificial Sequence: Synthetic peptide
TFLPSTLKSL

SEQ ID NO: 963 - protein, 9 aa, Artificial Sequence
  Description of Artificial Sequence: Synthetic peptide
VYTFLPSTL

SEQ ID NO: 964 - protein, 9 aa, Artificial Sequence
  Description of Artificial Sequence: Synthetic peptide
YTFLPSTLK

SEQ ID NO: 965 - protein, 9 aa, Artificial Sequence
  Description of Artificial Sequence: Synthetic peptide
NVVPLCDLL

SEQ ID NO: 966 - protein, 10 aa, Artificial Sequence
  Description of Artificial Sequence: Synthetic peptide
NVVPLCDLLL

SEQ ID NO: 967 - protein, 9 aa, Artificial Sequence
  Description of Artificial Sequence: Synthetic peptide
PLCDLLLEM

SEQ ID NO: 968 - protein, 10 aa, Artificial Sequence
  Description of Artificial Sequence: Synthetic peptide
PLCDLLLEML

SEQ ID NO: 969 - protein, 10 aa, Artificial Sequence
  Description of Artificial Sequence: Synthetic peptide
VPLCDLLLEM

SEQ ID NO: 970 - protein, 9 aa, Artificial Sequence
  Description of Artificial Sequence: Synthetic peptide
VVPLCDLLL

SEQ ID NO: 971 - protein, 9 aa, Artificial Sequence
  Description of Artificial Sequence: Synthetic peptide
NVVPLNDLL

SEQ ID NO: 972 - protein, 10 aa, Artificial Sequence
  Description of Artificial Sequence: Synthetic peptide
NVVPLNDLLL

SEQ ID NO: 973 - protein, 9 aa, Artificial Sequence
  Description of Artificial Sequence: Synthetic peptide
PLNDLLLEM

SEQ ID NO: 974 - protein, 10 aa, Artificial Sequence
  Description of Artificial Sequence: Synthetic peptide
PLNDLLLEML

SEQ ID NO: 975 - protein, 10 aa, Artificial Sequence
  Description of Artificial Sequence: Synthetic peptide
VPLNDLLLEM

SEQ ID NO: 976 - protein, 9 aa, Artificial Sequence
  Description of Artificial Sequence: Synthetic peptide
NVVPLSDLL

SEQ ID NO: 977 - protein, 10 aa, Artificial Sequence
  Description of Artificial Sequence: Synthetic peptide
NVVPLSDLLL

SEQ ID NO: 978 - protein, 9 aa, Artificial Sequence
  Description of Artificial Sequence: Synthetic peptide
PLSDLLLEM

SEQ ID NO: 979 - protein, 10 aa, Artificial Sequence
  Description of Artificial Sequence: Synthetic peptide
PLSDLLLEML

SEQ ID NO: 980 - protein, 10 aa, Artificial Sequence
  Description of Artificial Sequence: Synthetic peptide
VPLSDLLLEM

SEQ ID NO: 981 - protein, 9 aa, Artificial Sequence
  Description of Artificial Sequence: Synthetic peptide
VVPLSDLLL

SEQ ID NO: 982 - protein, 10 aa, Artificial Sequence
  Description of Artificial Sequence: Synthetic peptide
VLERCPHRPI

SEQ ID NO: 983 - protein, 9 aa, Artificial Sequence
  Description of Artificial Sequence: Synthetic peptide
YTLDVLERC

SEQ ID NO: 984 - protein, 9 aa, Artificial Sequence
  Description of Artificial Sequence: Synthetic peptide
FQNGKMALS

SEQ ID NO: 985 - protein, 10 aa, Artificial Sequence
  Description of Artificial Sequence: Synthetic peptide
VMAGLGSPYV

SEQ ID NO: 986 - protein, 9 aa, Artificial Sequence
  Description of Artificial Sequence: Synthetic peptide
KPIIIGHHA

SEQ ID NO: 987 - protein, 9 aa, Artificial Sequence
  Description of Artificial Sequence: Synthetic peptide
KPIIIGCHA

SEQ ID NO: 988 - protein, 9 aa, Artificial Sequence
  Description of Artificial Sequence: Synthetic peptide
KPIIIGGHA

SEQ ID NO: 989 - protein, 9 aa, Artificial Sequence
  Description of Artificial Sequence: Synthetic peptide
KPIIIGSHA

SEQ ID NO: 990 - protein, 10 aa, Artificial Sequence
  Description of Artificial Sequence: Synthetic peptide
IIEYCCYGDL

SEQ ID NO: 991 - protein, 10 aa, Artificial Sequence
  Description of Artificial Sequence: Synthetic peptide
TIGGPTLVII

SEQ ID NO: 992 - protein, 9 aa, Artificial Sequence
  Description of Artificial Sequence: Synthetic peptide
VIIEYCCYG

SEQ ID NO: 993 - protein, 10 aa, Artificial Sequence
  Description of Artificial Sequence: Synthetic peptide
HMNIANLLGA

SEQ ID NO: 994 - protein, 10 aa, Artificial Sequence
  Description of Artificial Sequence: Synthetic peptide
IANLLGACTI

SEQ ID NO: 995 - protein, 9 aa, Artificial Sequence
  Description of Artificial Sequence: Synthetic peptide
MNIANLLGA

SEQ ID NO: 996 - protein, 9 aa, Artificial Sequence
  Description of Artificial Sequence: Synthetic peptide
YLGNHMNIA

SEQ ID NO: 997 - protein, 10 aa, Artificial Sequence
  Description of Artificial Sequence: Synthetic peptide
YLGNHMNIAN

SEQ ID NO: 998 - protein, 9 aa, Artificial Sequence
  Description of Artificial Sequence: Synthetic peptide
VLHESNSPY

SEQ ID NO: 999 - protein, 10 aa, Artificial Sequence
  Description of Artificial Sequence: Synthetic peptide
VLHESNSPYI

SEQ ID NO: 1000 - protein, 10 aa, Artificial Sequence
  Description of Artificial Sequence: Synthetic peptide
LQVLHECNSL

SEQ ID NO: 1001 - protein, 10 aa, Artificial Sequence
  Description of Artificial Sequence: Synthetic peptide
LYIVGFYGAF

SEQ ID NO: 1002 - protein, 9 aa, Artificial Sequence
  Description of Artificial Sequence: Synthetic peptide
NSLYIVGFY

SEQ ID NO: 1003 - protein, 9 aa, Artificial Sequence
  Description of Artificial Sequence: Synthetic peptide
QVLHECNSL

SEQ ID NO: 1004 - protein, 9 aa, Artificial Sequence
  Description of Artificial Sequence: Synthetic peptide
SLYIVGFYG

SEQ ID NO: 1005 - protein, 10 aa, Artificial Sequence
  Description of Artificial Sequence: Synthetic peptide
SLYIVGFYGA

SEQ ID NO: 1006 - protein, 9 aa, Artificial Sequence
  Description of Artificial Sequence: Synthetic peptide
VLHECNSLY

SEQ ID NO: 1007 - protein, 10 aa, Artificial Sequence
  Description of Artificial Sequence: Synthetic peptide
VLHECNSLYI

SEQ ID NO: 1008 - protein, 10 aa, Artificial Sequence
  Description of Artificial Sequence: Synthetic peptide
FYQQQQQSDL

SEQ ID NO: 1009 - protein, 10 aa, Artificial Sequence
  Description of Artificial Sequence: Synthetic peptide
QQQSDLQPPA

SEQ ID NO: 1010 - protein, 9 aa, Artificial Sequence
  Description of Artificial Sequence: Synthetic peptide
QQSDLQPPA

SEQ ID NO: 1011 - protein, 9 aa, Artificial Sequence
  Description of Artificial Sequence: Synthetic peptide
YQQQQQSDL

SEQ ID NO: 1012 - protein, 9 aa, Artificial Sequence
  Description of Artificial Sequence: Synthetic peptide
FELLSTPPL

SEQ ID NO: 1013 - protein, 10 aa, Artificial Sequence
  Description of Artificial Sequence: Synthetic peptide
LLSTPPLSPS

SEQ ID NO: 1014 - protein, 9 aa, Artificial Sequence
  Description of Artificial Sequence: Synthetic peptide
FELLPIPPL

SEQ ID NO: 1015 - protein, 10 aa, Artificial Sequence
  Description of Artificial Sequence: Synthetic peptide
IWKKFELLPI

SEQ ID NO: 1016 - protein, 10 aa, Artificial Sequence
  Description of Artificial Sequence: Synthetic peptide
LLPIPPLSPS

SEQ ID NO: 1017 - protein, 9 aa, Artificial Sequence
  Description of Artificial Sequence: Synthetic peptide
LPIPPLSPS

SEQ ID NO: 1018 - protein, 10 aa, Artificial Sequence
  Description of Artificial Sequence: Synthetic peptide
IIEYCFYGDL

SEQ ID NO: 1019 - protein, 9 aa, Artificial Sequence
  Description of Artificial Sequence: Synthetic peptide
IIIEYCFYG

SEQ ID NO: 1020 - protein, 9 aa, Artificial Sequence
  Description of Artificial Sequence: Synthetic peptide
IYIIIEYCF

SEQ ID NO: 1021 - protein, 10 aa, Artificial Sequence
  Description of Artificial Sequence: Synthetic peptide
IYIIIEYCFY

SEQ ID NO: 1022 - protein, 10 aa, Artificial Sequence
  Description of Artificial Sequence: Synthetic peptide
YIIIEYCFYG

SEQ ID NO: 1023 - protein, 10 aa, Artificial Sequence
  Description of Artificial Sequence: Synthetic peptide
KITEQEKDFL

SEQ ID NO: 1024 - protein, 11 aa, Artificial Sequence
  Description of Artificial Sequence: Synthetic peptide
STRDPLSEITK

SEQ ID NO: 1025 - protein, 8 aa, Artificial Sequence
  Description of Artificial Sequence: Synthetic peptide
DPLSEITK

SEQ ID NO: 1026 - protein, 10 aa, Artificial Sequence
  Description of Artificial Sequence: Synthetic peptide
LPLKFRDAET

SEQ ID NO: 1027 - protein, 10 aa, Artificial Sequence
  Description of Artificial Sequence: Synthetic peptide
QTGVMICAYL

SEQ ID NO: 1028 - protein, 10 aa, Artificial Sequence
  Description of Artificial Sequence: Synthetic peptide
AFSGEYIPTV

SEQ ID NO: 1029 - protein, 9 aa, Artificial Sequence
  Description of Artificial Sequence: Synthetic peptide
SMNRRPILT

SEQ ID NO: 1030 - protein, 10 aa, Artificial Sequence
  Description of Artificial Sequence: Synthetic peptide
YMCNSSCMGS

SEQ ID NO: 1031 - protein, 9 aa, Artificial Sequence
  Description of Artificial Sequence: Synthetic peptide
GMNQRPILT

SEQ ID NO: 1032 - protein, 9 aa, Artificial Sequence
  Description of Artificial Sequence: Synthetic peptide
GMNWRPILT

SEQ ID NO: 1033 - protein, 10 aa, Artificial Sequence
  Description of Artificial Sequence: Synthetic peptide
LLGRNSFEVC

SEQ ID NO: 1034 - protein, 9 aa, Artificial Sequence
  Description of Artificial Sequence: Synthetic peptide
ALKYIFVAV

SEQ ID NO: 1035 - protein, 10 aa, Artificial Sequence
  Description of Artificial Sequence: Synthetic peptide
ALKYIFVAVR

SEQ ID NO: 1036 - protein, 9 aa, Artificial Sequence
  Description of Artificial Sequence: Synthetic peptide
AVRAICVMK

SEQ ID NO: 1037 - protein, 10 aa, Artificial Sequence
  Description of Artificial Sequence: Synthetic peptide
AVRAICVMKS

SEQ ID NO: 1038 - protein, 9 aa, Artificial Sequence
  Description of Artificial Sequence: Synthetic peptide
CVEKKTALK

SEQ ID NO: 1039 - protein, 10 aa, Artificial Sequence
  Description of Artificial Sequence: Synthetic peptide
CVEKKTALKY

SEQ ID NO: 1040 - protein, 9 aa, Artificial Sequence
  Description of Artificial Sequence: Synthetic peptide
CVMKSFLIF

SEQ ID NO: 1041 - protein, 10 aa, Artificial Sequence
  Description of Artificial Sequence: Synthetic peptide
CVMKSFLIFR

SEQ ID NO: 1042 - protein, 9 aa, Artificial Sequence
  Description of Artificial Sequence: Synthetic peptide
FLIFRRWKS

SEQ ID NO: 1043 - protein, 10 aa, Artificial Sequence
  Description of Artificial Sequence: Synthetic peptide
FRRWKSHSPL

SEQ ID NO: 1044 - protein, 9 aa, Artificial Sequence
  Description of Artificial Sequence: Synthetic peptide
FVAVRAICV

SEQ ID NO: 1045 - protein, 10 aa, Artificial Sequence
  Description of Artificial Sequence: Synthetic peptide
FVAVRAICVM

SEQ ID NO: 1046 - protein, 9 aa, Artificial Sequence
  Description of Artificial Sequence: Synthetic peptide
IQLHLSHPI

SEQ ID NO: 1047 - protein, 10 aa, Artificial Sequence
  Description of Artificial Sequence: Synthetic peptide
KSFLIFRRWK

SEQ ID NO: 1048 - protein, 9 aa, Artificial Sequence
  Description of Artificial Sequence: Synthetic peptide
KTALKYIFV

SEQ ID NO: 1049 - protein, 10 aa, Artificial Sequence
  Description of Artificial Sequence: Synthetic peptide
KYIFVAVRAI

SEQ ID NO: 1050 - protein, 10 aa, Artificial Sequence
  Description of Artificial Sequence: Synthetic peptide
RWKSHSPLQI

SEQ ID NO: 1051 - protein, 10 aa, Artificial Sequence
  Description of Artificial Sequence: Synthetic peptide
TALKYIFVAV

SEQ ID NO: 1052 - protein, 10 aa, Artificial Sequence
  Description of Artificial Sequence: Synthetic peptide
VAVRAICVMK

SEQ ID NO: 1053 - protein, 9 aa, Artificial Sequence
  Description of Artificial Sequence: Synthetic peptide
VMKSFLIFR

SEQ ID NO: 1054 - protein, 10 aa, Artificial Sequence
  Description of Artificial Sequence: Synthetic peptide
VMKSFLIFRR

SEQ ID NO: 1055 - protein, 9 aa, Artificial Sequence
  Description of Artificial Sequence: Synthetic peptide
YIFVAVRAI

SEQ ID NO: 1056 - protein, 9 aa, Artificial Sequence
  Description of Artificial Sequence: Synthetic peptide
ALFFFFFET

SEQ ID NO: 1057 - protein, 10 aa, Artificial Sequence
  Description of Artificial Sequence: Synthetic peptide
ALFFFFFETK

SEQ ID NO: 1058 - protein, 10 aa, Artificial Sequence
  Description of Artificial Sequence: Synthetic peptide
AQAGVQWRSL

SEQ ID NO: 1059 - protein, 10 aa, Artificial Sequence
  Description of Artificial Sequence: Synthetic peptide
CLANFCIFNR

SEQ ID NO: 1060 - protein, 10 aa, Artificial Sequence
  Description of Artificial Sequence: Synthetic peptide
CLSFLSSWDY

SEQ ID NO: 1061 - protein, 9 aa, Artificial Sequence
  Description of Artificial Sequence: Synthetic peptide
FFETKSCSV

SEQ ID NO: 1062 - protein, 10 aa, Artificial Sequence
  Description of Artificial Sequence: Synthetic peptide
FFFETKSCSV

SEQ ID NO: 1063 - protein, 10 aa, Artificial Sequence
  Description of Artificial Sequence: Synthetic peptide
FKLFSCLSFL

SEQ ID NO: 1064 - protein, 10 aa, Artificial Sequence
  Description of Artificial Sequence: Synthetic peptide
FLSSWDYRRM

SEQ ID NO: 1065 - protein, 10 aa, Artificial Sequence
  Description of Artificial Sequence: Synthetic peptide
GFKLFSCLSF

SEQ ID NO: 1066 - protein, 9 aa, Artificial Sequence
  Description of Artificial Sequence: Synthetic peptide
KLFSCLSFL

SEQ ID NO: 1067 - protein, 10 aa, Artificial Sequence
  Description of Artificial Sequence: Synthetic peptide
KLFSCLSFLS

SEQ ID NO: 1068 - protein, 10 aa, Artificial Sequence
  Description of Artificial Sequence: Synthetic peptide
LALFFFFFET

SEQ ID NO: 1069 - protein, 9 aa, Artificial Sequence
  Description of Artificial Sequence: Synthetic peptide
LFFFFFETK

SEQ ID NO: 1070 - protein, 9 aa, Artificial Sequence
  Description of Artificial Sequence: Synthetic peptide
LSFLSSWDY

SEQ ID NO: 1071 - protein, 10 aa, Artificial Sequence
  Description of Artificial Sequence: Synthetic peptide
LSFLSSWDYR

SEQ ID NO: 1072 - protein, 9 aa, Artificial Sequence
  Description of Artificial Sequence: Synthetic peptide
RMPPCLANF

SEQ ID NO: 1073 - protein, 10 aa, Artificial Sequence
  Description of Artificial Sequence: Synthetic peptide
RRMPPCLANF

SEQ ID NO: 1074 - protein, 10 aa, Artificial Sequence
  Description of Artificial Sequence: Synthetic peptide
SLQPPPPGFK

SEQ ID NO: 1075 - protein, 9 aa, Artificial Sequence
  Description of Artificial Sequence: Synthetic peptide
VQWRSLGSL

SEQ ID NO: 1076 - protein, 9 aa, Artificial Sequence
  Description of Artificial Sequence: Synthetic peptide
FFFSVIFST

SEQ ID NO: 1077 - protein, 10 aa, Artificial Sequence
  Description of Artificial Sequence: Synthetic peptide
MSVCFFFFSV

SEQ ID NO: 1078 - protein, 9 aa, Artificial Sequence
  Description of Artificial Sequence: Synthetic peptide
SVCFFFFSV

SEQ ID NO: 1079 - protein, 10 aa, Artificial Sequence
  Description of Artificial Sequence: Synthetic peptide
SVCFFFFSVI

SEQ ID NO: 1080 - protein, 10 aa, Artificial Sequence
  Description of Artificial Sequence: Synthetic peptide
FFCYILNTMF

SEQ ID NO: 1081 - protein, 10 aa, Artificial Sequence
  Description of Artificial Sequence: Synthetic peptide
MSVCFFFFCY

SEQ ID NO: 1082 - protein, 10 aa, Artificial Sequence
  Description of Artificial Sequence: Synthetic peptide
SVCFFFFCYI

SEQ ID NO: 1083 - protein, 9 aa, Artificial Sequence
  Description of Artificial Sequence: Synthetic peptide
KQWSSVTSL

SEQ ID NO: 1084 - protein, 9 aa, Artificial Sequence
  Description of Artificial Sequence: Synthetic peptide
VLWMPTSTV

SEQ ID NO: 1085 - protein, 9 aa, Artificial Sequence
  Description of Artificial Sequence: Synthetic peptide
ILIRKAMTV

SEQ ID NO: 1086 - protein, 8 aa, Artificial Sequence
  Description of Artificial Sequence: Synthetic peptide
RMKVPLMK

SEQ ID NO: 1087 - protein, 9 aa, Artificial Sequence
  Description of Artificial Sequence: Synthetic peptide
TLKKKPRDI

SEQ ID NO: 1088 - protein, 10 aa, Artificial Sequence
  Description of Artificial Sequence: Synthetic peptide
LIEGFEALLK

SEQ ID NO: 1089 - protein, 9 aa, Artificial Sequence
  Description of Artificial Sequence: Synthetic peptide
QQLKWTPHI

SEQ ID NO: 1090 - protein, 10 aa, Artificial Sequence
  Description of Artificial Sequence: Synthetic peptide
QLKWTPHILK

SEQ ID NO: 1091 - protein, 10 aa, Artificial Sequence
  Description of Artificial Sequence: Synthetic peptide
IVSEKNQQLK

SEQ ID NO: 1092 - protein, 11 aa, Artificial Sequence
  Description of Artificial Sequence: Synthetic peptide
NQQLKWTPHIL

SEQ ID NO: 1093 - protein, 10 aa, Artificial Sequence
  Description of Artificial Sequence: Synthetic peptide
NQQLKWTPHI

SEQ ID NO: 1094 - protein, 9 aa, Artificial Sequence
  Description of Artificial Sequence: Synthetic peptide
QLKWTPHIL

SEQ ID NO: 1095 - protein, 10 aa, Artificial Sequence
  Description of Artificial Sequence: Synthetic peptide
GPPRPPRAAC

SEQ ID NO: 1096 - protein, 9 aa, Artificial Sequence
  Description of Artificial Sequence: Synthetic peptide
PPRPPRAAC

SEQ ID NO: 1097 - protein, 9 aa, Artificial Sequence
  Description of Artificial Sequence: Synthetic peptide
SLRRKYLRV

SEQ ID NO: 1098 - protein, 10 aa, Artificial Sequence
  Description of Artificial Sequence: Synthetic peptide
SAACHRRGCV

SEQ ID NO: 1099 - protein, 10 aa, Artificial Sequence
  Description of Artificial Sequence: Synthetic peptide
ALWECSLPQA

SEQ ID NO: 1100 - protein, 9 aa, Artificial Sequence
  Description of Artificial Sequence: Synthetic peptide
CLIVSRTLL

SEQ ID NO: 1101 - protein, 10 aa, Artificial Sequence
  Description of Artificial Sequence: Synthetic peptide
CLIVSRTLLL

SEQ ID NO: 1102 - protein, 9 aa, Artificial Sequence
  Description of Artificial Sequence: Synthetic peptide
FLLALWECS

SEQ ID NO: 1103 - protein, 10 aa, Artificial Sequence
  Description of Artificial Sequence: Synthetic peptide
FLLALWECSL

SEQ ID NO: 1104 - protein, 9 aa, Artificial Sequence
  Description of Artificial Sequence: Synthetic peptide
IVSRTLLLV

SEQ ID NO: 1105 - protein, 9 aa, Artificial Sequence
  Description of Artificial Sequence: Synthetic peptide
LIVSRTLLL

SEQ ID NO: 1106 - protein, 10 aa, Artificial Sequence
  Description of Artificial Sequence: Synthetic peptide
LIVSRTLLLV

SEQ ID NO: 1107 - protein, 9 aa, Artificial Sequence
  Description of Artificial Sequence: Synthetic peptide
LLALWECSL

SEQ ID NO: 1108 - protein, 9 aa, Artificial Sequence
  Description of Artificial Sequence: Synthetic peptide
LPQARLCLI

SEQ ID NO: 1109 - protein, 10 aa, Artificial Sequence
  Description of Artificial Sequence: Synthetic peptide
LPQARLCLIV

SEQ ID NO: 1110 - protein, 10 aa, Artificial Sequence
  Description of Artificial Sequence: Synthetic peptide
NVRDKKRATF

SEQ ID NO: 1111 - protein, 10 aa, Artificial Sequence
  Description of Artificial Sequence: Synthetic peptide
SLPQARLCLI

SEQ ID NO: 1112 - protein, 9 aa, Artificial Sequence
  Description of Artificial Sequence: Synthetic peptide
FFCWILSCK

SEQ ID NO: 1113 - protein, 10 aa, Artificial Sequence
  Description of Artificial Sequence: Synthetic peptide
FFFCWILSCK

SEQ ID NO: 1114 - protein, 9 aa, Artificial Sequence
  Description of Artificial Sequence: Synthetic peptide
ITAFFFCWI

SEQ ID NO: 1115 - protein, 10 aa, Artificial Sequence
  Description of Artificial Sequence: Synthetic peptide
LYITAFFFCW

SEQ ID NO: 1116 - protein, 10 aa, Artificial Sequence
  Description of Artificial Sequence: Synthetic peptide
YITAFFFCWI

SEQ ID NO: 1117 - protein, 9 aa, Artificial Sequence
  Description of Artificial Sequence: Synthetic peptide
ITAFFLLDI

SEQ ID NO: 1118 - protein, 9 aa, Artificial Sequence
  Description of Artificial Sequence: Synthetic peptide
LLYITAFFL

SEQ ID NO: 1119 - protein, 10 aa, Artificial Sequence
  Description of Artificial Sequence: Synthetic peptide
LLYITAFFLL

SEQ ID NO: 1120 - protein, 9 aa, Artificial Sequence
  Description of Artificial Sequence: Synthetic peptide
LYITAFFLL

SEQ ID NO: 1121 - protein, 10 aa, Artificial Sequence
  Description of Artificial Sequence: Synthetic peptide
LYITAFFLLD

SEQ ID NO: 1122 - protein, 10 aa, Artificial Sequence
  Description of Artificial Sequence: Synthetic peptide
YITAFFLLDI

SEQ ID NO: 1123 - protein, 9 aa, Artificial Sequence
  Description of Artificial Sequence: Synthetic peptide
GSNEVTTRY

SEQ ID NO: 1124 - protein, 9 aa, Artificial Sequence
  Description of Artificial Sequence: Synthetic peptide
MPKDVNIQV

SEQ ID NO: 1125 - protein, 10 aa, Artificial Sequence
  Description of Artificial Sequence: Synthetic peptide
TGSNEVTTRY

SEQ ID NO: 1126 - protein, 10 aa, Artificial Sequence
  Description of Artificial Sequence: Synthetic peptide
KKLMLLRLNL

SEQ ID NO: 1127 - protein, 9 aa, Artificial Sequence
  Description of Artificial Sequence: Synthetic peptide
KLMLLRLNL

SEQ ID NO: 1128 - protein, 10 aa, Artificial Sequence
  Description of Artificial Sequence: Synthetic peptide
KLMLLRLNLR

SEQ ID NO: 1129 - protein, 9 aa, Artificial Sequence
  Description of Artificial Sequence: Synthetic peptide
LLRLNLRKM

SEQ ID NO: 1130 - protein, 8 aa, Artificial Sequence
  Description of Artificial Sequence: Synthetic peptide
LMLLRLNL

SEQ ID NO: 1131 - protein, 10 aa, Artificial Sequence
  Description of Artificial Sequence: Synthetic peptide
LMLLRLNLRK

SEQ ID NO: 1132 - protein, 10 aa, Artificial Sequence
  Description of Artificial Sequence: Synthetic peptide
LNLRKMCGPF

SEQ ID NO: 1133 - protein, 9 aa, Artificial Sequence
  Description of Artificial Sequence: Synthetic peptide
MLLRLNLRK

SEQ ID NO: 1134 - protein, 10 aa, Artificial Sequence
  Description of Artificial Sequence: Synthetic peptide
MLLRLNLRKM

SEQ ID NO: 1135 - protein, 9 aa, Artificial Sequence
  Description of Artificial Sequence: Synthetic peptide
NLRKMCGPF

SEQ ID NO: 1136 - protein, 10 aa, Artificial Sequence
  Description of Artificial Sequence: Synthetic peptide
NYCQKKLMLL

SEQ ID NO: 1137 - protein, 9 aa, Artificial Sequence
  Description of Artificial Sequence: Synthetic peptide
YCQKKLMLL

SEQ ID NO: 1138 - protein, 10 aa, Artificial Sequence
  Description of Artificial Sequence: Synthetic peptide
FKKKTYTCAI

SEQ ID NO: 1139 - protein, 10 aa, Artificial Sequence
  Description of Artificial Sequence: Synthetic peptide
ITTVKATETK

SEQ ID NO: 1140 - protein, 9 aa, Artificial Sequence
  Description of Artificial Sequence: Synthetic peptide
KSKKKETFK

SEQ ID NO: 1141 - protein, 10 aa, Artificial Sequence
  Description of Artificial Sequence: Synthetic peptide
KSKKKETFKK

SEQ ID NO: 1142 - protein, 10 aa, Artificial Sequence
  Description of Artificial Sequence: Synthetic peptide
KTYTCAITTV

SEQ ID NO: 1143 - protein, 9 aa, Artificial Sequence
  Description of Artificial Sequence: Synthetic peptide
TFKKKTYTC

SEQ ID NO: 1144 - protein, 9 aa, Artificial Sequence
  Description of Artificial Sequence: Synthetic peptide
TYTCAITTV

SEQ ID NO: 1145 - protein, 10 aa, Artificial Sequence
  Description of Artificial Sequence: Synthetic peptide
TYTCAITTVK

SEQ ID NO: 1146 - protein, 9 aa, Artificial Sequence
  Description of Artificial Sequence: Synthetic peptide
YTCAITTVK

SEQ ID NO: 1147 - protein, 9 aa, Artificial Sequence
  Description of Artificial Sequence: Synthetic peptide
TAKSKKRNL

SEQ ID NO: 1148 - protein, 9 aa, Artificial Sequence
  Description of Artificial Sequence: Synthetic peptide
FALCGFWQI

SEQ ID NO: 1149 - protein, 8 aa, Artificial Sequence
  Description of Artificial Sequence: Synthetic peptide
LKKLRSPL

SEQ ID NO: 1150 - protein, 8 aa, Artificial Sequence
  Description of Artificial Sequence: Synthetic peptide
SLKKVPAL

SEQ ID NO: 1151 - protein, 10 aa, Artificial Sequence
  Description of Artificial Sequence: Synthetic peptide
RKISNWSLKK

SEQ ID NO: 1152 - protein, 11 aa, Artificial Sequence
  Description of Artificial Sequence: Synthetic peptide
VPALKKLRSPL

SEQ ID NO: 1153 - protein, 10 aa, Artificial Sequence
  Description of Artificial Sequence: Synthetic peptide
KRVNTAWKTK

SEQ ID NO: 1154 - protein, 10 aa, Artificial Sequence
  Description of Artificial Sequence: Synthetic peptide
MTKKKRVNTA

SEQ ID NO: 1155 - protein, 9 aa, Artificial Sequence
  Description of Artificial Sequence: Synthetic peptide
RVNTAWKTK

SEQ ID NO: 1156 - protein, 10 aa, Artificial Sequence
  Description of Artificial Sequence: Synthetic peptide
RVNTAWKTKK

SEQ ID NO: 1157 - protein, 9 aa, Artificial Sequence
  Description of Artificial Sequence: Synthetic peptide
TKKKRVNTA

SEQ ID NO: 1158 - protein, 10 aa, Artificial Sequence
  Description of Artificial Sequence: Synthetic peptide
WKTKKTSFSL

SEQ ID NO: 1159 - protein, 9 aa, Artificial Sequence
  Description of Artificial Sequence: Synthetic peptide
ALMSAMTTS

SEQ ID NO: 1160 - protein, 9 aa, Artificial Sequence
  Description of Artificial Sequence: Synthetic peptide
AMTTSSSQK

SEQ ID NO: 1161 - protein, 10 aa, Artificial Sequence
  Description of Artificial Sequence: Synthetic peptide
AMTTSSSQKN

SEQ ID NO: 1162 - protein, 9 aa, Artificial Sequence
  Description of Artificial Sequence: Synthetic peptide
CIMKEKKSL

SEQ ID NO: 1163 - protein, 10 aa, Artificial Sequence
  Description of Artificial Sequence: Synthetic peptide
CIMKEKKSLV

SEQ ID NO: 1164 - protein, 8 aa, Artificial Sequence
  Description of Artificial Sequence: Synthetic peptide
IMKEKKSL

SEQ ID NO: 1165 - protein, 9 aa, Artificial Sequence
  Description of Artificial Sequence: Synthetic peptide
IMKEKKSLV

SEQ ID NO: 1166 - protein, 10 aa, Artificial Sequence
  Description of Artificial Sequence: Synthetic peptide
KSLVRLSSCV

SEQ ID NO: 1167 - protein, 10 aa, Artificial Sequence
  Description of Artificial Sequence: Synthetic peptide
LVRLSSCVPV

SEQ ID NO: 1168 - protein, 9 aa, Artificial Sequence
  Description of Artificial Sequence: Synthetic peptide
RLSSCVPVA

SEQ ID NO: 1169 - protein, 10 aa, Artificial Sequence
  Description of Artificial Sequence: Synthetic peptide
RLSSCVPVAL

SEQ ID NO: 1170 - protein, 10 aa, Artificial Sequence
  Description of Artificial Sequence: Synthetic peptide
SAMTTSSSQK

SEQ ID NO: 1171 - protein, 9 aa, Artificial Sequence
  Description of Artificial Sequence: Synthetic peptide
SLVRLSSCV

SEQ ID NO: 1172 - protein, 9 aa, Artificial Sequence
  Description of Artificial Sequence: Synthetic peptide
VPVALMSAM

SEQ ID NO: 1173 - protein, 10 aa, Artificial Sequence
  Description of Artificial Sequence: Synthetic peptide
VRLSSCVPVA

SEQ ID NO: 1174 - protein, 9 aa, Artificial Sequence
  Description of Artificial Sequence: Synthetic peptide
KMRKKYAQK

SEQ ID NO: 1175 - protein, 9 aa, Artificial Sequence
  Description of Artificial Sequence: Synthetic peptide
FVMSDTTYK

SEQ ID NO: 1176 - protein, 10 aa, Artificial Sequence
  Description of Artificial Sequence: Synthetic peptide
FVMSDTTYKI

SEQ ID NO: 1177 - protein, 9 aa, Artificial Sequence
  Description of Artificial Sequence: Synthetic peptide
KTFEKKGEK

SEQ ID NO: 1178 - protein, 10 aa, Artificial Sequence
  Description of Artificial Sequence: Synthetic peptide
LFVMSDTTYK

SEQ ID NO: 1179 - protein, 9 aa, Artificial Sequence
  Description of Artificial Sequence: Synthetic peptide
MSDTTYKIY

SEQ ID NO: 1180 - protein, 9 aa, Artificial Sequence
  Description of Artificial Sequence: Synthetic peptide
VMSDTTYKI

SEQ ID NO: 1181 - protein, 10 aa, Artificial Sequence
  Description of Artificial Sequence: Synthetic peptide
VMSDTTYKIY

SEQ ID NO: 1182 - protein, 10 aa, Artificial Sequence
  Description of Artificial Sequence: Synthetic peptide
YLTKWPKFFL

SEQ ID NO: 1183 - protein, 9 aa, Artificial Sequence
  Description of Artificial Sequence: Synthetic peptide
FLQERNLPP

SEQ ID NO: 1184 - protein, 9 aa, Artificial Sequence
  Description of Artificial Sequence: Synthetic peptide
FRRPHSCLA

SEQ ID NO: 1185 - protein, 9 aa, Artificial Sequence
  Description of Artificial Sequence: Synthetic peptide
LIVLRVVRL

SEQ ID NO: 1186 - protein, 9 aa, Artificial Sequence
  Description of Artificial Sequence: Synthetic peptide
EVKHLHHLL

SEQ ID NO: 1187 - protein, 10 aa, Artificial Sequence
  Description of Artificial Sequence: Synthetic peptide
HLHHLLKQLK

SEQ ID NO: 1188 - protein, 9 aa, Artificial Sequence
  Description of Artificial Sequence: Synthetic peptide
HLLLKRERV

SEQ ID NO: 1189 - protein, 9 aa, Artificial Sequence
  Description of Artificial Sequence: Synthetic peptide
KIKHLLLKR

SEQ ID NO: 1190 - protein, 9 aa, Artificial Sequence
  Description of Artificial Sequence: Synthetic peptide
KPSEKYLKI

SEQ ID NO: 1191 - protein, 9 aa, Artificial Sequence
  Description of Artificial Sequence: Synthetic peptide
KYLKIKHLL

SEQ ID NO: 1192 - protein, 10 aa, Artificial Sequence
  Description of Artificial Sequence: Synthetic peptide
KYLKIKHLLL

SEQ ID NO: 1193 - protein, 10 aa, Artificial Sequence
  Description of Artificial Sequence: Synthetic peptide
LLKQLKPSEK

SEQ ID NO: 1194 - protein, 9 aa, Artificial Sequence
  Description of Artificial Sequence: Synthetic peptide
LLKRERVDL

SEQ ID NO: 1195 - protein, 10 aa, Artificial Sequence
  Description of Artificial Sequence: Synthetic peptide
LLLKRERVDL

SEQ ID NO: 1196 - protein, 10 aa, Artificial Sequence
  Description of Artificial Sequence: Synthetic peptide
QLKPSEKYLK

SEQ ID NO: 1197 - protein, 9 aa, Artificial Sequence
  Description of Artificial Sequence: Synthetic peptide
YLKIKHLLL

SEQ ID NO: 1198 - protein, 10 aa, Artificial Sequence
  Description of Artificial Sequence: Synthetic peptide
YLKIKHLLLK

SEQ ID NO: 1199 - protein, 9 aa, Artificial Sequence
  Description of Artificial Sequence: Synthetic peptide
ILPRKVLQM

SEQ ID NO: 1200 - protein, 9 aa, Artificial Sequence
  Description of Artificial Sequence: Synthetic peptide
KVLQMDFLV

SEQ ID NO: 1201 - protein, 10 aa, Artificial Sequence
  Description of Artificial Sequence: Synthetic peptide
LPRKVLQMDF

SEQ ID NO: 1202 - protein, 10 aa, Artificial Sequence
  Description of Artificial Sequence: Synthetic peptide
LQMDFLVHPA

SEQ ID NO: 1203 - protein, 9 aa, Artificial Sequence
  Description of Artificial Sequence: Synthetic peptide
QMDFLVHPA

SEQ ID NO: 1204 - protein, 10 aa, Artificial Sequence
  Description of Artificial Sequence: Synthetic peptide
YILPRKVLQM

SEQ ID NO: 1205 - protein, 10 aa, Artificial Sequence
  Description of Artificial Sequence: Synthetic peptide
APSPASRLQC

SEQ ID NO: 1206 - protein, 10 aa, Artificial Sequence
  Description of Artificial Sequence: Synthetic peptide
HPLAPMPSKT

SEQ ID NO: 1207 - protein, 9 aa, Artificial Sequence
  Description of Artificial Sequence: Synthetic peptide
ILPLPQLLL

SEQ ID NO: 1208 - protein, 9 aa, Artificial Sequence
  Description of Artificial Sequence: Synthetic peptide
LLLSADQQA

SEQ ID NO: 1209 - protein, 9 aa, Artificial Sequence
  Description of Artificial Sequence: Synthetic peptide
LPTQTRGCI

SEQ ID NO: 1210 - protein, 10 aa, Artificial Sequence
  Description of Artificial Sequence: Synthetic peptide
LPTQTRGCIL

SEQ ID NO: 1211 - protein, 10 aa, Artificial Sequence
  Description of Artificial Sequence: Synthetic peptide
RISCLPTQTR

SEQ ID NO: 1212 - protein, 9 aa, Artificial Sequence
  Description of Artificial Sequence: Synthetic peptide
SLAETVSLH

SEQ ID NO: 1213 - protein, 9 aa, Artificial Sequence
  Description of Artificial Sequence: Synthetic peptide
TPRSSSSSS

SEQ ID NO: 1214 - protein, 10 aa, Artificial Sequence
  Description of Artificial Sequence: Synthetic peptide
TPRSSSSSSS

SEQ ID NO: 1215 - protein, 9 aa, Artificial Sequence
  Description of Artificial Sequence: Synthetic peptide
ALPPVLLSL

SEQ ID NO: 1216 - protein, 10 aa, Artificial Sequence
  Description of Artificial Sequence: Synthetic peptide
ALPPVLLSLA

SEQ ID NO: 1217 - protein, 9 aa, Artificial Sequence
  Description of Artificial Sequence: Synthetic peptide
ALPRPLLAL

SEQ ID NO: 1218 - protein, 9 aa, Artificial Sequence
  Description of Artificial Sequence: Synthetic peptide
ASRTASCIL

SEQ ID NO: 1219 - protein, 10 aa, Artificial Sequence
  Description of Artificial Sequence: Synthetic peptide
EALPRPLLAL

SEQ ID NO: 1220 - protein, 9 aa, Artificial Sequence
  Description of Artificial Sequence: Synthetic peptide
HLGHPVASR

SEQ ID NO: 1221 - protein, 9 aa, Artificial Sequence
  Description of Artificial Sequence: Synthetic peptide
HPVASRTAS

SEQ ID NO: 1222 - protein, 10 aa, Artificial Sequence
  Description of Artificial Sequence: Synthetic peptide
HPVASRTASC

SEQ ID NO: 1223 - protein, 10 aa, Artificial Sequence
  Description of Artificial Sequence: Synthetic peptide
IIQLSLLSLL

SEQ ID NO: 1224 - protein, 9 aa, Artificial Sequence
  Description of Artificial Sequence: Synthetic peptide
IQLSLLSLL

SEQ ID NO: 1225 - protein, 10 aa, Artificial Sequence
  Description of Artificial Sequence: Synthetic peptide
IQLSLLSLLI

SEQ ID NO: 1226 - protein, 9 aa, Artificial Sequence
  Description of Artificial Sequence: Synthetic peptide
LLALPPVLL

SEQ ID NO: 1227 - protein, 9 aa, Artificial Sequence
  Description of Artificial Sequence: Synthetic peptide
LLIPPLTCL

SEQ ID NO: 1228 - protein, 10 aa, Artificial Sequence
  Description of Artificial Sequence: Synthetic peptide
LLIPPLTCLA

SEQ ID NO: 1229 - protein, 9 aa, Artificial Sequence
  Description of Artificial Sequence: Synthetic peptide
LLSLLIPPL

SEQ ID NO: 1230 - protein, 10 aa, Artificial Sequence
  Description of Artificial Sequence: Synthetic peptide
LLSLLIPPLT

SEQ ID NO: 1231 - protein, 10 aa, Artificial Sequence
  Description of Artificial Sequence: Synthetic peptide
LPRPLLALPP

SEQ ID NO: 1232 - protein, 9 aa, Artificial Sequence
  Description of Artificial Sequence: Synthetic peptide
QLSLLSLLI

SEQ ID NO: 1233 - protein, 9 aa, Artificial Sequence
  Description of Artificial Sequence: Synthetic peptide
RLLQCQATR

SEQ ID NO: 1234 - protein, 9 aa, Artificial Sequence
  Description of Artificial Sequence: Synthetic peptide
RPLLALPPV

SEQ ID NO: 1235 - protein, 10 aa, Artificial Sequence
  Description of Artificial Sequence: Synthetic peptide
RPLLALPPVL

SEQ ID NO: 1236 - protein, 9 aa, Artificial Sequence
  Description of Artificial Sequence: Synthetic peptide
SLAQDHSRL

SEQ ID NO: 1237 - protein, 10 aa, Artificial Sequence
  Description of Artificial Sequence: Synthetic peptide
SLAQDHSRLL

SEQ ID NO: 1238 - protein, 10 aa, Artificial Sequence
  Description of Artificial Sequence: Synthetic peptide
SLLIPPLTCL

SEQ ID NO: 1239 - protein, 9 aa, Artificial Sequence
  Description of Artificial Sequence: Synthetic peptide
SLLSLLIPP

SEQ ID NO: 1240 - protein, 10 aa, Artificial Sequence
  Description of Artificial Sequence: Synthetic peptide
SLLSLLIPPL

SEQ ID NO: 1241 - protein, 10 aa, Artificial Sequence
  Description of Artificial Sequence: Synthetic peptide
AAATSAASTL

SEQ ID NO: 1242 - protein, 10 aa, Artificial Sequence
  Description of Artificial Sequence: Synthetic peptide
AAIPASTSAV

SEQ ID NO: 1243 - protein, 9 aa, Artificial Sequence
  Description of Artificial Sequence: Synthetic peptide
AIPASTSAV

SEQ ID NO: 1244 - protein, 10 aa, Artificial Sequence
  Description of Artificial Sequence: Synthetic peptide
ALPAGCVSSA

SEQ ID NO: 1245 - protein, 10 aa, Artificial Sequence
  Description of Artificial Sequence: Synthetic peptide
APLLTATGSV

SEQ ID NO: 1246 - protein, 9 aa, Artificial Sequence
  Description of Artificial Sequence: Synthetic peptide
APVLSASIL

SEQ ID NO: 1247 - protein, 9 aa, Artificial Sequence
  Description of Artificial Sequence: Synthetic peptide
ATLLPATTV

SEQ ID NO: 1248 - protein, 10 aa, Artificial Sequence
  Description of Artificial Sequence: Synthetic peptide
ATVSTTTAPV

SEQ ID NO: 1249 - protein, 10 aa, Artificial Sequence
  Description of Artificial Sequence: Synthetic peptide
AVPANCLFPA

SEQ ID NO: 1250 - protein, 10 aa, Artificial Sequence
  Description of Artificial Sequence: Synthetic peptide
CLFPAALPST

SEQ ID NO: 1251 - protein, 9 aa, Artificial Sequence
  Description of Artificial Sequence: Synthetic peptide
CPTFVSAAA

SEQ ID NO: 1252 - protein, 9 aa, Artificial Sequence
  Description of Artificial Sequence: Synthetic peptide
FPAALPSTA

SEQ ID NO: 1253 - protein, 10 aa, Artificial Sequence
  Description of Artificial Sequence: Synthetic peptide
FPAALPSTAG

SEQ ID NO: 1254 - protein, 9 aa, Artificial Sequence
  Description of Artificial Sequence: Synthetic peptide
GAECHGRPL

SEQ ID NO: 1255 - protein, 9 aa, Artificial Sequence
  Description of Artificial Sequence: Synthetic peptide
GAISRFIWV

SEQ ID NO: 1256 - protein, 10 aa, Artificial Sequence
  Description of Artificial Sequence: Synthetic peptide
ILPAAIPAST

SEQ ID NO: 1257 - protein, 10 aa, Artificial Sequence
  Description of Artificial Sequence: Synthetic peptide
IWVSGILSPL

SEQ ID NO: 1258 - protein, 10 aa, Artificial Sequence
  Description of Artificial Sequence: Synthetic peptide
LLTATGSVSL

SEQ ID NO: 1259 - protein, 9 aa, Artificial Sequence
  Description of Artificial Sequence: Synthetic peptide
LLYTADSSL

SEQ ID NO: 1260 - protein, 9 aa, Artificial Sequence
  Description of Artificial Sequence: Synthetic peptide
LPAAATSAA

SEQ ID NO: 1261 - protein, 10 aa, Artificial Sequence
  Description of Artificial Sequence: Synthetic peptide
LPAAATSAAS

SEQ ID NO: 1262 - protein, 9 aa, Artificial Sequence
  Description of Artificial Sequence: Synthetic peptide
LPAAIPAST

SEQ ID NO: 1263 - protein, 9 aa, Artificial Sequence
  Description of Artificial Sequence: Synthetic peptide
LPAGCVSSA

SEQ ID NO: 1264 - protein, 10 aa, Artificial Sequence
  Description of Artificial Sequence: Synthetic peptide
LPAGCVSSAP

SEQ ID NO: 1265 - protein, 9 aa, Artificial Sequence
  Description of Artificial Sequence: Synthetic peptide
LYTADSSLW

SEQ ID NO: 1266 - protein, 9 aa, Artificial Sequence
  Description of Artificial Sequence: Synthetic peptide
QPAKSSPSA

SEQ ID NO: 1267 - protein, 10 aa, Artificial Sequence
  Description of Artificial Sequence: Synthetic peptide
QPAKSSPSAA

SEQ ID NO: 1268 - protein, 9 aa, Artificial Sequence
  Description of Artificial Sequence: Synthetic peptide
RFIWVSGIL

SEQ ID NO: 1269 - protein, 9 aa, Artificial Sequence
  Description of Artificial Sequence: Synthetic peptide
RPQRVWSTG

SEQ ID NO: 1270 - protein, 10 aa, Artificial Sequence
  Description of Artificial Sequence: Synthetic peptide
RVWSTGPDSI

SEQ ID NO: 1271 - protein, 9 aa, Artificial Sequence
  Description of Artificial Sequence: Synthetic peptide
SAVPGSIPL

SEQ ID NO: 1272 - protein, 9 aa, Artificial Sequence
  Description of Artificial Sequence: Synthetic peptide
SILPAAIPA

SEQ ID NO: 1273 - protein, 9 aa, Artificial Sequence
  Description of Artificial Sequence: Synthetic peptide
SLPAAATSA

SEQ ID NO: 1274 - protein, 10 aa, Artificial Sequence
  Description of Artificial Sequence: Synthetic peptide
SLPAAATSAA

SEQ ID NO: 1275 - protein, 9 aa, Artificial Sequence
  Description of Artificial Sequence: Synthetic peptide
SLWTTRPQR

SEQ ID NO: 1276 - protein, 10 aa, Artificial Sequence
  Description of Artificial Sequence: Synthetic peptide
SLWTTRPQRV

SEQ ID NO: 1277 - protein, 9 aa, Artificial Sequence
  Description of Artificial Sequence: Synthetic peptide
SPSAAAATL

SEQ ID NO: 1278 - protein, 10 aa, Artificial Sequence
  Description of Artificial Sequence: Synthetic peptide
SPSAAAATLL

SEQ ID NO: 1279 - protein, 10 aa, Artificial Sequence
  Description of Artificial Sequence: Synthetic peptide
TLDALPAGCV

SEQ ID NO: 1280 - protein, 9 aa, Artificial Sequence
  Description of Artificial Sequence: Synthetic peptide
TVSTTTAPV

SEQ ID NO: 1281 - protein, 9 aa, Artificial Sequence
  Description of Artificial Sequence: Synthetic peptide
VLSASILPA

SEQ ID NO: 1282 - protein, 10 aa, Artificial Sequence
  Description of Artificial Sequence: Synthetic peptide
VLSASILPAA

SEQ ID NO: 1283 - protein, 9 aa, Artificial Sequence
  Description of Artificial Sequence: Synthetic peptide
VPANCLFPA

SEQ ID NO: 1284 - protein, 10 aa, Artificial Sequence
  Description of Artificial Sequence: Synthetic peptide
VPANCLFPAA

SEQ ID NO: 1285 - protein, 9 aa, Artificial Sequence
  Description of Artificial Sequence: Synthetic peptide
VPDPSCPTF

SEQ ID NO: 1286 - protein, 9 aa, Artificial Sequence
  Description of Artificial Sequence: Synthetic peptide
VPGSIPLPA

SEQ ID NO: 1287 - protein, 10 aa, Artificial Sequence
  Description of Artificial Sequence: Synthetic peptide
VPGSIPLPAV

SEQ ID NO: 1288 - protein, 9 aa, Artificial Sequence
  Description of Artificial Sequence: Synthetic peptide
WVSGILSPL

SEQ ID NO: 1289 - protein, 10 aa, Artificial Sequence
  Description of Artificial Sequence: Synthetic peptide
YTADSSLWTT

SEQ ID NO: 1290 - protein, 9 aa, Artificial Sequence
  Description of Artificial Sequence: Synthetic peptide
APAGMVNRA

SEQ ID NO: 1291 - protein, 9 aa, Artificial Sequence
  Description of Artificial Sequence: Synthetic peptide
ASLHRRSYL

SEQ ID NO: 1292 - protein, 10 aa, Artificial Sequence
  Description of Artificial Sequence: Synthetic peptide
ASLHRRSYLK

SEQ ID NO: 1293 - protein, 10 aa, Artificial Sequence
  Description of Artificial Sequence: Synthetic peptide
FLLMDNKAPA

SEQ ID NO: 1294 - protein, 9 aa, Artificial Sequence
  Description of Artificial Sequence: Synthetic peptide
HPRRSPSRL

SEQ ID NO: 1295 - protein, 9 aa, Artificial Sequence
  Description of Artificial Sequence: Synthetic peptide
HPSLHISSP

SEQ ID NO: 1296 - protein, 10 aa, Artificial Sequence
  Description of Artificial Sequence: Synthetic peptide
HRRSYLKIHL

SEQ ID NO: 1297 - protein, 10 aa, Artificial Sequence
  Description of Artificial Sequence: Synthetic peptide
HSRFLLMDNK

SEQ ID NO: 1298 - protein, 10 aa, Artificial Sequence
  Description of Artificial Sequence: Synthetic peptide
KLPIPSSASL

SEQ ID NO: 1299 - protein, 10 aa, Artificial Sequence
  Description of Artificial Sequence: Synthetic peptide
KVLTLSSSSH

SEQ ID NO: 1300 - protein, 9 aa, Artificial Sequence
  Description of Artificial Sequence: Synthetic peptide
LIHSRFLLM

SEQ ID NO: 1301 - protein, 9 aa, Artificial Sequence
  Description of Artificial Sequence: Synthetic peptide
LLMDNKAPA

SEQ ID NO: 1302 - protein, 10 aa, Artificial Sequence
  Description of Artificial Sequence: Synthetic peptide
LMDNKAPAGM

SEQ ID NO: 1303 - protein, 9 aa, Artificial Sequence
  Description of Artificial Sequence: Synthetic peptide
LPIPSSASL

SEQ ID NO: 1304 - protein, 9 aa, Artificial Sequence
  Description of Artificial Sequence: Synthetic peptide
MPNLRISSS

SEQ ID NO: 1305 - protein, 10 aa, Artificial Sequence
  Description of Artificial Sequence: Synthetic peptide
MPNLRISSSH

SEQ ID NO: 1306 - protein, 10 aa, Artificial Sequence
  Description of Artificial Sequence: Synthetic peptide
NLRISSSHSL

SEQ ID NO: 1307 - protein, 10 aa, Artificial Sequence
  Description of Artificial Sequence: Synthetic peptide
PPTHSHRLSL

SEQ ID NO: 1308 - protein, 10 aa, Artificial Sequence
  Description of Artificial Sequence: Synthetic peptide
RAGRRVPWAA

SEQ ID NO: 1309 - protein, 10 aa, Artificial Sequence
  Description of Artificial Sequence: Synthetic peptide
RARLHITTSK

SEQ ID NO: 1310 - protein, 10 aa, Artificial Sequence
  Description of Artificial Sequence: Synthetic peptide
RISSSHSLNH

SEQ ID NO: 1311 - protein, 9 aa, Artificial Sequence
  Description of Artificial Sequence: Synthetic peptide
RLHTPPSSR

SEQ ID NO: 1312 - protein, 10 aa, Artificial Sequence
  Description of Artificial Sequence: Synthetic peptide
RLHTPPSSRR

SEQ ID NO: 1313 - protein, 9 aa, Artificial Sequence
  Description of Artificial Sequence: Synthetic peptide
RLRILSPSL

SEQ ID NO: 1314 - protein, 9 aa, Artificial Sequence
  Description of Artificial Sequence: Synthetic peptide
RPLMPNLRI

SEQ ID NO: 1315 - protein, 9 aa, Artificial Sequence
  Description of Artificial Sequence: Synthetic peptide
RPRPLMPNL

SEQ ID NO: 1316 - protein, 10 aa, Artificial Sequence
  Description of Artificial Sequence: Synthetic peptide
SASLHRRSYL

SEQ ID NO: 1317 - protein, 9 aa, Artificial Sequence
  Description of Artificial Sequence: Synthetic peptide
SLHISSPRL

SEQ ID NO: 1318 - protein, 9 aa, Artificial Sequence
  Description of Artificial Sequence: Synthetic peptide
SLHRRSYLK

SEQ ID NO: 1319 - protein, 10 aa, Artificial Sequence
  Description of Artificial Sequence: Synthetic peptide
SLHRRSYLKI

SEQ ID NO: 1320 - protein, 9 aa, Artificial Sequence
  Description of Artificial Sequence: Synthetic peptide
SLIHSRFLL

SEQ ID NO: 1321 - protein, 10 aa, Artificial Sequence
  Description of Artificial Sequence: Synthetic peptide
SLIHSRFLLM

SEQ ID NO: 1322 - protein, 9 aa, Artificial Sequence
  Description of Artificial Sequence: Synthetic peptide
SLLTSSSNL

SEQ ID NO: 1323 - protein, 10 aa, Artificial Sequence
  Description of Artificial Sequence: Synthetic peptide
SLNHHSSSPL

SEQ ID NO: 1324 - protein, 10 aa, Artificial Sequence
  Description of Artificial Sequence: Synthetic peptide
SLSSPSKLPI

SEQ ID NO: 1325 - protein, 9 aa, Artificial Sequence
  Description of Artificial Sequence: Synthetic peptide
SPLSLHTPS

SEQ ID NO: 1326 - protein, 10 aa, Artificial Sequence
  Description of Artificial Sequence: Synthetic peptide
SPLSLHTPSS

SEQ ID NO: 1327 - protein, 9 aa, Artificial Sequence
  Description of Artificial Sequence: Synthetic peptide
SPPTHSHRL

SEQ ID NO: 1328 - protein, 9 aa, Artificial Sequence
  Description of Artificial Sequence: Synthetic peptide
SPRLHTPPS

SEQ ID NO: 1329 - protein, 10 aa, Artificial Sequence
  Description of Artificial Sequence: Synthetic peptide
SPRLHTPPSS

SEQ ID NO: 1330 - protein, 10 aa, Artificial Sequence
  Description of Artificial Sequence: Synthetic peptide
SPSLSSPSKL

SEQ ID NO: 1331 - protein, 9 aa, Artificial Sequence
  Description of Artificial Sequence: Synthetic peptide
SYLKIHLGL

SEQ ID NO: 1332 - protein, 10 aa, Artificial Sequence
  Description of Artificial Sequence: Synthetic peptide
TPSNHRPRPL

SEQ ID NO: 1333 - protein, 10 aa, Artificial Sequence
  Description of Artificial Sequence: Synthetic peptide
TPSSHPSLHI

SEQ ID NO: 1334 - protein, 10 aa, Artificial Sequence
  Description of Artificial Sequence: Synthetic peptide
CVPFWTGRIL

SEQ ID NO: 1335 - protein, 11 aa, Artificial Sequence
  Description of Artificial Sequence: Synthetic peptide
HCVPFWTGRIL

SEQ ID NO: 1336 - protein, 9 aa, Artificial Sequence
  Description of Artificial Sequence: Synthetic peptide
ILLPSAASV

SEQ ID NO: 1337 - protein, 10 aa, Artificial Sequence
  Description of Artificial Sequence: Synthetic peptide
ILLPSAASVC

SEQ ID NO: 1338 - protein, 11 aa, Artificial Sequence
  Description of Artificial Sequence: Synthetic peptide
LLPSAASVCPI

SEQ ID NO: 1339 - protein, 10 aa, Artificial Sequence
  Description of Artificial Sequence: Synthetic peptide
LPSAASVCPI

SEQ ID NO: 1340 - protein, 8 aa, Artificial Sequence
  Description of Artificial Sequence: Synthetic peptide
MRPHCVPF

SEQ ID NO: 1341 - protein, 10 aa, Artificial Sequence
  Description of Artificial Sequence: Synthetic peptide
RILLPSAASV

SEQ ID NO: 1342 - protein, 9 aa, Artificial Sequence
  Description of Artificial Sequence: Synthetic peptide
RMRPHCVPF

SEQ ID NO: 1343 - protein, 10 aa, Artificial Sequence
  Description of Artificial Sequence: Synthetic peptide
RMRPHCVPFW

SEQ ID NO: 1344 - protein, 9 aa, Artificial Sequence
  Description of Artificial Sequence: Synthetic peptide
RTNPTVRMR

SEQ ID NO: 1345 - protein, 9 aa, Artificial Sequence
  Description of Artificial Sequence: Synthetic peptide
SVCPIPFEA

SEQ ID NO: 1346 - protein, 9 aa, Artificial Sequence
  Description of Artificial Sequence: Synthetic peptide
TVRMRPHCV

SEQ ID NO: 1347 - protein, 11 aa, Artificial Sequence
  Description of Artificial Sequence: Synthetic peptide
TVRMRPHCVPF

SEQ ID NO: 1348 - protein, 9 aa, Artificial Sequence
  Description of Artificial Sequence: Synthetic peptide
VPFWTGRIL

SEQ ID NO: 1349 - protein, 10 aa, Artificial Sequence
  Description of Artificial Sequence: Synthetic peptide
VPFWTGRILL

SEQ ID NO: 1350 - protein, 10 aa, Artificial Sequence
  Description of Artificial Sequence: Synthetic peptide
VRMRPHCVPF

SEQ ID NO: 1351 - protein, 9 aa, Artificial Sequence
  Description of Artificial Sequence: Synthetic peptide
AMVPRGVSM

SEQ ID NO: 1352 - protein, 10 aa, Artificial Sequence
  Description of Artificial Sequence: Synthetic peptide
AMVPRGVSMA

SEQ ID NO: 1353 - protein, 10 aa, Artificial Sequence
  Description of Artificial Sequence: Synthetic peptide
AWAPTSRTPW

SEQ ID NO: 1354 - protein, 10 aa, Artificial Sequence
  Description of Artificial Sequence: Synthetic peptide
CPMPTTPVQA

SEQ ID NO: 1355 - protein, 10 aa, Artificial Sequence
  Description of Artificial Sequence: Synthetic peptide
CPSTVPPSPA

SEQ ID NO: 1356 - protein, 10 aa, Artificial Sequence
  Description of Artificial Sequence: Synthetic peptide
GAMVPRGVSM

SEQ ID NO: 1357 - protein, 10 aa, Artificial Sequence
  Description of Artificial Sequence: Synthetic peptide
MPCPMPTTPV

SEQ ID NO: 1358 - protein, 9 aa, Artificial Sequence
  Description of Artificial Sequence: Synthetic peptide
MPTTPVQAW

SEQ ID NO: 1359 - protein, 10 aa, Artificial Sequence
  Description of Artificial Sequence: Synthetic peptide
MPTTPVQAWL

SEQ ID NO: 1360 - protein, 10 aa, Artificial Sequence
  Description of Artificial Sequence: Synthetic peptide
SLPEDRYTQA

SEQ ID NO: 1361 - protein, 9 aa, Artificial Sequence
  Description of Artificial Sequence: Synthetic peptide
SPAQPYLRV

SEQ ID NO: 1362 - protein, 10 aa, Artificial Sequence
  Description of Artificial Sequence: Synthetic peptide
SPAQPYLRVS

SEQ ID NO: 1363 - protein, 9 aa, Artificial Sequence
  Description of Artificial Sequence: Synthetic peptide
TIMPCPMPT

SEQ ID NO: 1364 - protein, 9 aa, Artificial Sequence
  Description of Artificial Sequence: Synthetic peptide
TPVQAWLEA

SEQ ID NO: 1365 - protein, 9 aa, Artificial Sequence
  Description of Artificial Sequence: Synthetic peptide
TSRTPWGAM

SEQ ID NO: 1366 - protein, 10 aa, Artificial Sequence
  Description of Artificial Sequence: Synthetic peptide
VPPSPAQPYL

SEQ ID NO: 1367 - protein, 9 aa, Artificial Sequence
  Description of Artificial Sequence: Synthetic peptide
VPRGVSMAH

SEQ ID NO: 1368 - protein, 10 aa, Artificial Sequence
  Description of Artificial Sequence: Synthetic peptide
CLSARTGLSI

SEQ ID NO: 1369 - protein, 10 aa, Artificial Sequence
  Description of Artificial Sequence: Synthetic peptide
CTTLNSPPLK

SEQ ID NO: 1370 - protein, 9 aa, Artificial Sequence
  Description of Artificial Sequence: Synthetic peptide
GLSISCTTL

SEQ ID NO: 1371 - protein, 9 aa, Artificial Sequence
  Description of Artificial Sequence: Synthetic peptide
SPPLKKMSM

SEQ ID NO: 1372 - protein, 9 aa, Artificial Sequence
  Description of Artificial Sequence: Synthetic peptide
TLNSPPLKK

SEQ ID NO: 1373 - protein, 9 aa, Artificial Sequence
  Description of Artificial Sequence: Synthetic peptide
TTLNSPPLK

SEQ ID NO: 1374 - protein, 10 aa, Artificial Sequence
  Description of Artificial Sequence: Synthetic peptide
TTLNSPPLKK

SEQ ID NO: 1375 - protein, 9 aa, Artificial Sequence
  Description of Artificial Sequence: Synthetic peptide
LQRFRFTHV

SEQ ID NO: 1376 - protein, 10 aa, Artificial Sequence
  Description of Artificial Sequence: Synthetic peptide
LQRFRFTHVI

SEQ ID NO: 1377 - protein, 9 aa, Artificial Sequence
  Description of Artificial Sequence: Synthetic peptide
RLSSVLQRF

SEQ ID NO: 1378 - protein, 10 aa, Artificial Sequence
  Description of Artificial Sequence: Synthetic peptide
RLSSVLQRFR

SEQ ID NO: 1379 - protein, 10 aa, Artificial Sequence
  Description of Artificial Sequence: Synthetic peptide
VLQRFRFTHV

SEQ ID NO: 1380 - protein, 10 aa, Artificial Sequence
  Description of Artificial Sequence: Synthetic peptide
ASVGRHSLSK

SEQ ID NO: 1381 - protein, 9 aa, Artificial Sequence
  Description of Artificial Sequence: Synthetic peptide
KFLPFWGFL

SEQ ID NO: 1382 - protein, 9 aa, Artificial Sequence
  Description of Artificial Sequence: Synthetic peptide
LASVGRHSL

SEQ ID NO: 1383 - protein, 10 aa, Artificial Sequence
  Description of Artificial Sequence: Synthetic peptide
LPFWGFLEEF

SEQ ID NO: 1384 - protein, 9 aa, Artificial Sequence
  Description of Artificial Sequence: Synthetic peptide
PFWGFLEEF

SEQ ID NO: 1385 - protein, 9 aa, Artificial Sequence
  Description of Artificial Sequence: Synthetic peptide
SVGRHSLSK

SEQ ID NO: 1386 - protein, 9 aa, Artificial Sequence
  Description of Artificial Sequence: Synthetic peptide
APRPIRPPF

SEQ ID NO: 1387 - protein, 10 aa, Artificial Sequence
  Description of Artificial Sequence: Synthetic peptide
APRPIRPPFL

SEQ ID NO: 1388 - protein, 10 aa, Artificial Sequence
  Description of Artificial Sequence: Synthetic peptide
AQKMKKAHFL

SEQ ID NO: 1389 - protein, 9 aa, Artificial Sequence
  Description of Artificial Sequence: Synthetic peptide
FLPSAAQKM

SEQ ID NO: 1390 - protein, 10 aa, Artificial Sequence
  Description of Artificial Sequence: Synthetic peptide
GLFLPSAAQK

SEQ ID NO: 1391 - protein, 9 aa, Artificial Sequence
  Description of Artificial Sequence: Synthetic peptide
HPLLVSLLL

SEQ ID NO: 1392 - protein, 10 aa, Artificial Sequence
  Description of Artificial Sequence: Synthetic peptide
KAHFLKTWFR

SEQ ID NO: 1393 - protein, 9 aa, Artificial Sequence
  Description of Artificial Sequence: Synthetic peptide
KARFSTASL

SEQ ID NO: 1394 - protein, 9 aa, Artificial Sequence
  Description of Artificial Sequence: Synthetic peptide
KMKKAHFLK

SEQ ID NO: 1395 - protein, 10 aa, Artificial Sequence
  Description of Artificial Sequence: Synthetic peptide
KTWFRSNPTK

SEQ ID NO: 1396 - protein, 9 aa, Artificial Sequence
  Description of Artificial Sequence: Synthetic peptide
LAKELTHPL

SEQ ID NO: 1397 - protein, 10 aa, Artificial Sequence
  Description of Artificial Sequence: Synthetic peptide
LAKELTHPLL

SEQ ID NO: 1398 - protein, 10 aa, Artificial Sequence
  Description of Artificial Sequence: Synthetic peptide
NPTKTKKARF

SEQ ID NO: 1399 - protein, 9 aa, Artificial Sequence
  Description of Artificial Sequence: Synthetic peptide
QKMKKAHFL

SEQ ID NO: 1400 - protein, 9 aa, Artificial Sequence
  Description of Artificial Sequence: Synthetic peptide
RFSTASLAK

SEQ ID NO: 1401 - protein, 10 aa, Artificial Sequence
  Description of Artificial Sequence: Synthetic peptide
RPIRPPFLES

SEQ ID NO: 1402 - protein, 9 aa, Artificial Sequence
  Description of Artificial Sequence: Synthetic peptide
RSNPTKTKK

SEQ ID NO: 1403 - protein, 10 aa, Artificial Sequence
  Description of Artificial Sequence: Synthetic peptide
SLAKELTHPL

SEQ ID NO: 1404 - protein, 9 aa, Artificial Sequence
  Description of Artificial Sequence: Synthetic peptide
TKKARFSTA

SEQ ID NO: 1405 - protein, 9 aa, Artificial Sequence
  Description of Artificial Sequence: Synthetic peptide
GLRFWNPSR

SEQ ID NO: 1406 - protein, 10 aa, Artificial Sequence
  Description of Artificial Sequence: Synthetic peptide
ISQLLSWPQK

SEQ ID NO: 1407 - protein, 9 aa, Artificial Sequence
  Description of Artificial Sequence: Synthetic peptide
RIAHISQLL

SEQ ID NO: 1408 - protein, 9 aa, Artificial Sequence
  Description of Artificial Sequence: Synthetic peptide
RLGYSSHQL

SEQ ID NO: 1409 - protein, 9 aa, Artificial Sequence
  Description of Artificial Sequence: Synthetic peptide
SQLLSWPQK

SEQ ID NO: 1410 - protein, 9 aa, Artificial Sequence
  Description of Artificial Sequence: Synthetic peptide
SRIAHISQL

SEQ ID NO: 1411 - protein, 9 aa, Artificial Sequence
  Description of Artificial Sequence: Synthetic peptide
WPQKTEERL

SEQ ID NO: 1412 - protein, 9 aa, Artificial Sequence
  Description of Artificial Sequence: Synthetic peptide
YSSHQLPRK

SEQ ID NO: 1413 - protein, 10 aa, Artificial Sequence
  Description of Artificial Sequence: Synthetic peptide
CPQRMTPGTT

SEQ ID NO: 1414 - protein, 9 aa, Artificial Sequence
  Description of Artificial Sequence: Synthetic peptide
EAEKRTRTL

SEQ ID NO: 1415 - protein, 9 aa, Artificial Sequence
  Description of Artificial Sequence: Synthetic peptide
GTTFITMMK

SEQ ID NO: 1416 - protein, 10 aa, Artificial Sequence
  Description of Artificial Sequence: Synthetic peptide
GTTFITMMKK

SEQ ID NO: 1417 - protein, 10 aa, Artificial Sequence
  Description of Artificial Sequence: Synthetic peptide
ITMMKKEAEK

SEQ ID NO: 1418 - protein, 9 aa, Artificial Sequence
  Description of Artificial Sequence: Synthetic peptide
RMTPGTTFI

SEQ ID NO: 1419 - protein, 9 aa, Artificial Sequence
  Description of Artificial Sequence: Synthetic peptide
SPYCPQRMT

SEQ ID NO: 1420 - protein, 9 aa, Artificial Sequence
  Description of Artificial Sequence: Synthetic peptide
TMMKKEAEK

SEQ ID NO: 1421 - protein, 9 aa, Artificial Sequence
  Description of Artificial Sequence: Synthetic peptide
TPGTTFITM

SEQ ID NO: 1422 - protein, 10 aa, Artificial Sequence
  Description of Artificial Sequence: Synthetic peptide
TPGTTFITMM

SEQ ID NO: 1423 - protein, 9 aa, Artificial Sequence
  Description of Artificial Sequence: Synthetic peptide
TTFITMMKK

SEQ ID NO: 1424 - protein, 9 aa, Artificial Sequence
  Description of Artificial Sequence: Synthetic peptide
CPGATWREA

SEQ ID NO: 1425 - protein, 10 aa, Artificial Sequence
  Description of Artificial Sequence: Synthetic peptide
CPGATWREAA

SEQ ID NO: 1426 - protein, 10 aa, Artificial Sequence
  Description of Artificial Sequence: Synthetic peptide
RSRCPGATWR

SEQ ID NO: 1427 - protein, 9 aa, Artificial Sequence
  Description of Artificial Sequence: Synthetic peptide
TPRATRSRC

SEQ ID NO: 1428 - protein, 10 aa, Artificial Sequence
  Description of Artificial Sequence: Synthetic peptide
HVLPEPHLAL

SEQ ID NO: 1429 - protein, 10 aa, Artificial Sequence
  Description of Artificial Sequence: Synthetic peptide
RPLQTHVLPE

SEQ ID NO: 1430 - protein, 10 aa, Artificial Sequence
  Description of Artificial Sequence: Synthetic peptide
VLWTTPPLQH

SEQ ID NO: 1431 - protein, 10 aa, Artificial Sequence
  Description of Artificial Sequence: Synthetic peptide
APSESPCSPF

SEQ ID NO: 1432 - protein, 10 aa, Artificial Sequence
  Description of Artificial Sequence: Synthetic peptide
CPLDHTTPPA

SEQ ID NO: 1433 - protein, 9 aa, Artificial Sequence
  Description of Artificial Sequence: Synthetic peptide
FLQEQYHEA

SEQ ID NO: 1434 - protein, 10 aa, Artificial Sequence
  Description of Artificial Sequence: Synthetic peptide
RLAFLQEQYH

SEQ ID NO: 1435 - protein, 10 aa, Artificial Sequence
  Description of Artificial Sequence: Synthetic peptide
SPCSPFRLAF

SEQ ID NO: 1436 - protein, 9 aa, Artificial Sequence
  Description of Artificial Sequence: Synthetic peptide
SPPWVRALL

SEQ ID NO: 1437 - protein, 10 aa, Artificial Sequence
  Description of Artificial Sequence: Synthetic peptide
YPACPLDHTT

SEQ ID NO: 1438 - protein, 9 aa, Artificial Sequence
  Description of Artificial Sequence: Synthetic peptide
ALHLRSCPC

SEQ ID NO: 1439 - protein, 9 aa, Artificial Sequence
  Description of Artificial Sequence: Synthetic peptide
CLHHRRHLV

SEQ ID NO: 1440 - protein, 10 aa, Artificial Sequence
  Description of Artificial Sequence: Synthetic peptide
CLHHRRHLVC

SEQ ID NO: 1441 - protein, 10 aa, Artificial Sequence
  Description of Artificial Sequence: Synthetic peptide
CLHRKSHPHL

SEQ ID NO: 1442 - protein, 9 aa, Artificial Sequence
  Description of Artificial Sequence: Synthetic peptide
CLRSHACPP

SEQ ID NO: 1443 - protein, 9 aa, Artificial Sequence
  Description of Artificial Sequence: Synthetic peptide
CLRSHTCPP

SEQ ID NO: 1444 - protein, 9 aa, Artificial Sequence
  Description of Artificial Sequence: Synthetic peptide
CLWCHACLH

SEQ ID NO: 1445 - protein, 9 aa, Artificial Sequence
  Description of Artificial Sequence: Synthetic peptide
CPHHLKNHL

SEQ ID NO: 1446 - protein, 9 aa, Artificial Sequence
  Description of Artificial Sequence: Synthetic peptide
CPHHLKNLL

SEQ ID NO: 1447 - protein, 9 aa, Artificial Sequence
  Description of Artificial Sequence: Synthetic peptide
CPHHLRTRL

SEQ ID NO: 1448 - protein, 10 aa, Artificial Sequence
  Description of Artificial Sequence: Synthetic peptide
CPLHLRSLPF

SEQ ID NO: 1449 - protein, 10 aa, Artificial Sequence
  Description of Artificial Sequence: Synthetic peptide
CPLPRHLKHL

SEQ ID NO: 1450 - protein, 10 aa, Artificial Sequence
  Description of Artificial Sequence: Synthetic peptide
CPLSLRSHPC

SEQ ID NO: 1451 - protein, 10 aa, Artificial Sequence
  Description of Artificial Sequence: Synthetic peptide
CPRHLRNCPL

SEQ ID NO: 1452 - protein, 9 aa, Artificial Sequence
  Description of Artificial Sequence: Synthetic peptide
FPHHLRHHA

SEQ ID NO: 1453 - protein, 10 aa, Artificial Sequence
  Description of Artificial Sequence: Synthetic peptide
FPHHLRHHAC

SEQ ID NO: 1454 - protein, 9 aa, Artificial Sequence
  Description of Artificial Sequence: Synthetic peptide
GLRSRTCPP

SEQ ID NO: 1455 - protein, 10 aa, Artificial Sequence
  Description of Artificial Sequence: Synthetic peptide
HACLHRLRNL

SEQ ID NO: 1456 - protein, 9 aa, Artificial Sequence
  Description of Artificial Sequence: Synthetic peptide
HLACLHHLR

SEQ ID NO: 1457 - protein, 9 aa, Artificial Sequence
  Description of Artificial Sequence: Synthetic peptide
HLCPPHLRY

SEQ ID NO: 1458 - protein, 10 aa, Artificial Sequence
  Description of Artificial Sequence: Synthetic peptide
HLCPPHLRYR

SEQ ID NO: 1459 - protein, 9 aa, Artificial Sequence
  Description of Artificial Sequence: Synthetic peptide
HLKHLACLH

SEQ ID NO: 1460 - protein, 9 aa, Artificial Sequence
  Description of Artificial Sequence: Synthetic peptide
HLKHRPCPH

SEQ ID NO: 1461 - protein, 9 aa, Artificial Sequence
  Description of Artificial Sequence: Synthetic peptide
HLKNHLCPP

SEQ ID NO: 1462 - protein, 9 aa, Artificial Sequence
  Description of Artificial Sequence: Synthetic peptide
HLKSHPCLH

SEQ ID NO: 1463 - protein, 9 aa, Artificial Sequence
  Description of Artificial Sequence: Synthetic peptide
HLKSLLCPL

SEQ ID NO: 1464 - protein, 9 aa, Artificial Sequence
  Description of Artificial Sequence: Synthetic peptide
HLLHLRRLY

SEQ ID NO: 1465 - protein, 9 aa, Artificial Sequence
  Description of Artificial Sequence: Synthetic peptide
HLRNCPLPR

SEQ ID NO: 1466 - protein, 10 aa, Artificial Sequence
  Description of Artificial Sequence: Synthetic peptide
HLRNCPLPRH

SEQ ID NO: 1467 - protein, 10 aa, Artificial Sequence
  Description of Artificial Sequence: Synthetic peptide
HLRRLYPHHL

SEQ ID NO: 1468 - protein, 9 aa, Artificial Sequence
  Description of Artificial Sequence: Synthetic peptide
HLRSHPCPL

SEQ ID NO: 1469 - protein, 10 aa, Artificial Sequence
  Description of Artificial Sequence: Synthetic peptide
HLRSHPCPLH

SEQ ID NO: 1470 - protein, 9 aa, Artificial Sequence
  Description of Artificial Sequence: Synthetic peptide
HLRSLPFPH

SEQ ID NO: 1471 - protein, 9 aa, Artificial Sequence
  Description of Artificial Sequence: Synthetic peptide
HLRTRLCPH

SEQ ID NO: 1472 - protein, 9 aa, Artificial Sequence
  Description of Artificial Sequence: Synthetic peptide
HLVCSHHLK

SEQ ID NO: 1473 - protein, 10 aa, Artificial Sequence
  Description of Artificial Sequence: Synthetic peptide
HPCLHHRRHL

SEQ ID NO: 1474 - protein, 9 aa, Artificial Sequence
  Description of Artificial Sequence: Synthetic peptide
HPGLRSRTC

SEQ ID NO: 1475 - protein, 10 aa, Artificial Sequence
  Description of Artificial Sequence: Synthetic peptide
HPHLLHLRRL

SEQ ID NO: 1476 - protein, 9 aa, Artificial Sequence
  Description of Artificial Sequence: Synthetic peptide
HRKSHPHLL

SEQ ID NO: 1477 - protein, 9 aa, Artificial Sequence
  Description of Artificial Sequence: Synthetic peptide
HRRTRSCPC

SEQ ID NO: 1478 - protein, 10 aa, Artificial Sequence
  Description of Artificial Sequence: Synthetic peptide
KSHPHLLHLR

SEQ ID NO: 1479 - protein, 10 aa, Artificial Sequence
  Description of Artificial Sequence: Synthetic peptide
KSLLCPLHLR

SEQ ID NO: 1480 - protein, 10 aa, Artificial Sequence
  Description of Artificial Sequence: Synthetic peptide
LLCPLHLRSL

SEQ ID NO: 1481 - protein, 10 aa, Artificial Sequence
  Description of Artificial Sequence: Synthetic peptide
LLHLRRLYPH

SEQ ID NO: 1482 - protein, 9 aa, Artificial Sequence
  Description of Artificial Sequence: Synthetic peptide
LPRHLKHLA

SEQ ID NO: 1483 - protein, 10 aa, Artificial Sequence
  Description of Artificial Sequence: Synthetic peptide
LPRHLKHLAC

SEQ ID NO: 1484 - protein, 9 aa, Artificial Sequence
  Description of Artificial Sequence: Synthetic peptide
LRRLRSHTC

SEQ ID NO: 1485 - protein, 9 aa, Artificial Sequence
  Description of Artificial Sequence: Synthetic peptide
LRRLYPHHL

SEQ ID NO: 1486 - protein, 10 aa, Artificial Sequence
  Description of Artificial Sequence: Synthetic peptide
LVCSHHLKSL

SEQ ID NO: 1487 - protein, 10 aa, Artificial Sequence
  Description of Artificial Sequence: Synthetic peptide
NLRNHTCPPS

SEQ ID NO: 1488 - protein, 9 aa, Artificial Sequence
  Description of Artificial Sequence: Synthetic peptide
PLHLRSLPF

SEQ ID NO: 1489 - protein, 10 aa, Artificial Sequence
  Description of Artificial Sequence: Synthetic peptide
RLCPHHLKNH

SEQ ID NO: 1490 - protein, 9 aa, Artificial Sequence
  Description of Artificial Sequence: Synthetic peptide
RLYPHHLKH

SEQ ID NO: 1491 - protein, 10 aa, Artificial Sequence
  Description of Artificial Sequence: Synthetic peptide
RLYPHHLKHR

SEQ ID NO: 1492 - protein, 10 aa, Artificial Sequence
  Description of Artificial Sequence: Synthetic peptide
RPCPHHLKNL

SEQ ID NO: 1493 - protein, 10 aa, Artificial Sequence
  Description of Artificial Sequence: Synthetic peptide
RSHPCPLHLK

SEQ ID NO: 1494 - protein, 10 aa, Artificial Sequence
  Description of Artificial Sequence: Synthetic peptide
RSLPFPHHLR

SEQ ID NO: 1495 - protein, 9 aa, Artificial Sequence
  Description of Artificial Sequence: Synthetic peptide
RTRLCPHHL

SEQ ID NO: 1496 - protein, 10 aa, Artificial Sequence
  Description of Artificial Sequence: Synthetic peptide
RTRLCPHHLK

SEQ ID NO: 1497 - protein, 9 aa, Artificial Sequence
  Description of Artificial Sequence: Synthetic peptide
SLLCPLHLR

SEQ ID NO: 1498 - protein, 9 aa, Artificial Sequence
  Description of Artificial Sequence: Synthetic peptide
SLRSHACPP

SEQ ID NO: 1499 - protein, 9 aa, Artificial Sequence
  Description of Artificial Sequence: Synthetic peptide
SPLRSQANA

SEQ ID NO: 1500 - protein, 9 aa, Artificial Sequence
  Description of Artificial Sequence: Synthetic peptide
YLRRLRSHT

SEQ ID NO: 1501 - protein, 10 aa, Artificial Sequence
  Description of Artificial Sequence: Synthetic peptide
YPHHLKHRPC

SEQ ID NO: 1502 - protein, 9 aa, Artificial Sequence
  Description of Artificial Sequence: Synthetic peptide
FITSGQIFK

SEQ ID NO: 1503 - protein, 9 aa, Artificial Sequence
  Description of Artificial Sequence: Synthetic peptide
IFITSGQIF

SEQ ID NO: 1504 - protein, 9 aa, Artificial Sequence
  Description of Artificial Sequence: Synthetic peptide
SQSEALCVL

SEQ ID NO: 1505 - protein, 10 aa, Artificial Sequence
  Description of Artificial Sequence: Synthetic peptide
SQSEALCVLL

SEQ ID NO: 1506 - protein, 9 aa, Artificial Sequence
  Description of Artificial Sequence: Synthetic peptide
AYTGTILMM

SEQ ID NO: 1507 - protein, 10 aa, Artificial Sequence
  Description of Artificial Sequence: Synthetic peptide
DLKAYTGTIL

SEQ ID NO: 1508 - protein, 9 aa, Artificial Sequence
  Description of Artificial Sequence: Synthetic peptide
ILTKQIKTK

SEQ ID NO: 1509 - protein, 9 aa, Artificial Sequence
  Description of Artificial Sequence: Synthetic peptide
KMILTKQIK

SEQ ID NO: 1510 - protein, 9 aa, Artificial Sequence
  Description of Artificial Sequence: Synthetic peptide
KPTDTFLQI

SEQ ID NO: 1511 - protein, 10 aa, Artificial Sequence
  Description of Artificial Sequence: Synthetic peptide
KPTDTFLQIL

SEQ ID NO: 1512 - protein, 10 aa, Artificial Sequence
  Description of Artificial Sequence: Synthetic peptide
MILTKQIKTK

SEQ ID NO: 1513 - protein, 10 aa, Artificial Sequence
  Description of Artificial Sequence: Synthetic peptide
ITRYTIFVLK

SEQ ID NO: 1514 - protein, 9 aa, Artificial Sequence
  Description of Artificial Sequence: Synthetic peptide
LIAELHNIL

SEQ ID NO: 1515 - protein, 10 aa, Artificial Sequence
  Description of Artificial Sequence: Synthetic peptide
LIAELHNILL

SEQ ID NO: 1516 - protein, 10 aa, Artificial Sequence
  Description of Artificial Sequence: Synthetic peptide
MTPPNLIAEL

SEQ ID NO: 1517 - protein, 9 aa, Artificial Sequence
  Description of Artificial Sequence: Synthetic peptide
NLIAELHNI

SEQ ID NO: 1518 - protein, 10 aa, Artificial Sequence
  Description of Artificial Sequence: Synthetic peptide
NLIAELHNIL

SEQ ID NO: 1519 - protein, 10 aa, Artificial Sequence
  Description of Artificial Sequence: Synthetic peptide
RYTIFVLKDI

SEQ ID NO: 1520 - protein, 10 aa, Artificial Sequence
  Description of Artificial Sequence: Synthetic peptide
TITRYTIFVL

SEQ ID NO: 1521 - protein, 9 aa, Artificial Sequence
  Description of Artificial Sequence: Synthetic peptide
TPPNLIAEL

SEQ ID NO: 1522 - protein, 9 aa, Artificial Sequence
  Description of Artificial Sequence: Synthetic peptide
FLQFRTHTT

SEQ ID NO: 1523 - protein, 10 aa, Artificial Sequence
  Description of Artificial Sequence: Synthetic peptide
LPAKGEDIFL

SEQ ID NO: 1524 - protein, 10 aa, Artificial Sequence
  Description of Artificial Sequence: Synthetic peptide
LQFRTHTTGR

SEQ ID NO: 1525 - protein, 9 aa, Artificial Sequence
  Description of Artificial Sequence: Synthetic peptide
NLQSSVCGL

SEQ ID NO: 1526 - protein, 9 aa, Artificial Sequence
  Description of Artificial Sequence: Synthetic peptide
SSVCGLPAK

SEQ ID NO: 1527 - protein, 10 aa, Artificial Sequence
  Description of Artificial Sequence: Synthetic peptide
VQWRNLQSSV

SEQ ID NO: 1528 - protein, 9 aa, Artificial Sequence
  Description of Artificial Sequence: Synthetic peptide
GQNVSLLGK

SEQ ID NO: 1529 - protein, 10 aa, Artificial Sequence
  Description of Artificial Sequence: Synthetic peptide
HTRTRGNLRK

SEQ ID NO: 1530 - protein, 10 aa, Artificial Sequence
  Description of Artificial Sequence: Synthetic peptide
ILHTRTRGNL

SEQ ID NO: 1531 - protein, 10 aa, Artificial Sequence
  Description of Artificial Sequence: Synthetic peptide
KGQNVSLLGK

SEQ ID NO: 1532 - protein, 9 aa, Artificial Sequence
  Description of Artificial Sequence: Synthetic peptide
LLGKYILHT

SEQ ID NO: 1533 - protein, 10 aa, Artificial Sequence
  Description of Artificial Sequence: Synthetic peptide
LRKSRKWKSM

SEQ ID NO: 1534 - protein, 9 aa, Artificial Sequence
  Description of Artificial Sequence: Synthetic peptide
SLLGKYILH

SEQ ID NO: 1535 - protein, 10 aa, Artificial Sequence
  Description of Artificial Sequence: Synthetic peptide
SLLGKYILHT

SEQ ID NO: 1536 - protein, 9 aa, Artificial Sequence
  Description of Artificial Sequence: Synthetic peptide
CTSPLLAPV

SEQ ID NO: 1537 - protein, 9 aa, Artificial Sequence
  Description of Artificial Sequence: Synthetic peptide
FPENLPGQL

SEQ ID NO: 1538 - protein, 10 aa, Artificial Sequence
  Description of Artificial Sequence: Synthetic peptide
GLLAFWDSQV

SEQ ID NO: 1539 - protein, 9 aa, Artificial Sequence
  Description of Artificial Sequence: Synthetic peptide
IFCPFPENL

SEQ ID NO: 1540 - protein, 9 aa, Artificial Sequence
  Description of Artificial Sequence: Synthetic peptide
LLAFWDSQV

SEQ ID NO: 1541 - protein, 9 aa, Artificial Sequence
  Description of Artificial Sequence: Synthetic peptide
LLAPVIFCP

SEQ ID NO: 1542 - protein, 10 aa, Artificial Sequence
  Description of Artificial Sequence: Synthetic peptide
LLAPVIFCPF

SEQ ID NO: 1543 - protein, 9 aa, Artificial Sequence
  Description of Artificial Sequence: Synthetic peptide
LPCPQQDVL

SEQ ID NO: 1544 - protein, 9 aa, Artificial Sequence
  Description of Artificial Sequence: Synthetic peptide
RFPSGLLAF

SEQ ID NO: 1545 - protein, 10 aa, Artificial Sequence
  Description of Artificial Sequence: Synthetic peptide
RFPSGLLAFW

SEQ ID NO: 1546 - protein, 9 aa, Artificial Sequence
  Description of Artificial Sequence: Synthetic peptide
SPLLAPVIF

SEQ ID NO: 1547 - protein, 9 aa, Artificial Sequence
  Description of Artificial Sequence: Synthetic peptide
SPRGPCTSS

SEQ ID NO: 1548 - protein, 10 aa, Artificial Sequence
  Description of Artificial Sequence: Synthetic peptide
SPRGPCTSSS

SEQ ID NO: 1549 - protein, 9 aa, Artificial Sequence
  Description of Artificial Sequence: Synthetic peptide
SQVCDLHVL

SEQ ID NO: 1550 - protein, 10 aa, Artificial Sequence
  Description of Artificial Sequence: Synthetic peptide
VIFCPFPENL

SEQ ID NO: 1551 - protein, 9 aa, Artificial Sequence
  Description of Artificial Sequence: Synthetic peptide
AMVWPLLSI

SEQ ID NO: 1552 - protein, 10 aa, Artificial Sequence
  Description of Artificial Sequence: Synthetic peptide
AMVWPLLSIL

SEQ ID NO: 1553 - protein, 9 aa, Artificial Sequence
  Description of Artificial Sequence: Synthetic peptide
AQIAMVWPL

SEQ ID NO: 1554 - protein, 10 aa, Artificial Sequence
  Description of Artificial Sequence: Synthetic peptide
AQIAMVWPLL

SEQ ID NO: 1555 - protein, 9 aa, Artificial Sequence
  Description of Artificial Sequence: Synthetic peptide
CPMSRLRLA

SEQ ID NO: 1556 - protein, 10 aa, Artificial Sequence
  Description of Artificial Sequence: Synthetic peptide
CPMSRLRLAL

SEQ ID NO: 1557 - protein, 10 aa, Artificial Sequence
  Description of Artificial Sequence: Synthetic peptide
IAMVWPLLSI

SEQ ID NO: 1558 - protein, 10 aa, Artificial Sequence
  Description of Artificial Sequence: Synthetic peptide
ILSEWKEICV

SEQ ID NO: 1559 - protein, 9 aa, Artificial Sequence
  Description of Artificial Sequence: Synthetic peptide
IVWWCPMSR

SEQ ID NO: 1560 - protein, 10 aa, Artificial Sequence
  Description of Artificial Sequence: Synthetic peptide
IVWWCPMSRL

SEQ ID NO: 1561 - protein, 10 aa, Artificial Sequence
  Description of Artificial Sequence: Synthetic peptide
IWMTETLFDI

SEQ ID NO: 1562 - protein, 9 aa, Artificial Sequence
  Description of Artificial Sequence: Synthetic peptide
LLSILSEWK

SEQ ID NO: 1563 - protein, 9 aa, Artificial Sequence
  Description of Artificial Sequence: Synthetic peptide
MSAAQIAMV

SEQ ID NO: 1564 - protein, 9 aa, Artificial Sequence
  Description of Artificial Sequence: Synthetic peptide
MSRLRLALT

SEQ ID NO: 1565 - protein, 10 aa, Artificial Sequence
  Description of Artificial Sequence: Synthetic peptide
MSRLRLALTV

SEQ ID NO: 1566 - protein, 9 aa, Artificial Sequence
  Description of Artificial Sequence: Synthetic peptide
MVWPLLSIL

SEQ ID NO: 1567 - protein, 10 aa, Artificial Sequence
  Description of Artificial Sequence: Synthetic peptide
RLALTVPPST

SEQ ID NO: 1568 - protein, 9 aa, Artificial Sequence
  Description of Artificial Sequence: Synthetic peptide
TLFDIVWWC

SEQ ID NO: 1569 - protein, 10 aa, Artificial Sequence
  Description of Artificial Sequence: Synthetic peptide
TLFDIVWWCP

SEQ ID NO: 1570 - protein, 10 aa, Artificial Sequence
  Description of Artificial Sequence: Synthetic peptide
TMSAAQIAMV

SEQ ID NO: 1571 - protein, 10 aa, Artificial Sequence
  Description of Artificial Sequence: Synthetic peptide
VWSIWMTETL

SEQ ID NO: 1572 - protein, 9 aa, Artificial Sequence
  Description of Artificial Sequence: Synthetic peptide
WMTETLFDI

SEQ ID NO: 1573 - protein, 10 aa, Artificial Sequence
  Description of Artificial Sequence: Synthetic peptide
WMTETLFDIV

SEQ ID NO: 1574 - protein, 9 aa, Artificial Sequence
  Description of Artificial Sequence: Synthetic peptide
ALRCVFVPV

SEQ ID NO: 1575 - protein, 10 aa, Artificial Sequence
  Description of Artificial Sequence: Synthetic peptide
ALRCVFVPVL

SEQ ID NO: 1576 - protein, 9 aa, Artificial Sequence
  Description of Artificial Sequence: Synthetic peptide
ALSEHCPTT

SEQ ID NO: 1577 - protein, 10 aa, Artificial Sequence
  Description of Artificial Sequence: Synthetic peptide
AQRKRISARK

SEQ ID NO: 1578 - protein, 9 aa, Artificial Sequence
  Description of Artificial Sequence: Synthetic peptide
GAQRKRISA

SEQ ID NO: 1579 - protein, 9 aa, Artificial Sequence
  Description of Artificial Sequence: Synthetic peptide
HWMENISPF

SEQ ID NO: 1580 - protein, 9 aa, Artificial Sequence
  Description of Artificial Sequence: Synthetic peptide
LPSQRRNHW

SEQ ID NO: 1581 - protein, 10 aa, Artificial Sequence
  Description of Artificial Sequence: Synthetic peptide
LPSQRRNHWM

SEQ ID NO: 1582 - protein, 10 aa, Artificial Sequence
  Description of Artificial Sequence: Synthetic peptide
NISPFRSVGV

SEQ ID NO: 1583 - protein, 9 aa, Artificial Sequence
  Description of Artificial Sequence: Synthetic peptide
RISARKGSL

SEQ ID NO: 1584 - protein, 10 aa, Artificial Sequence
  Description of Artificial Sequence: Synthetic peptide
SPFRSVGVSA

SEQ ID NO: 1585 - protein, 10 aa, Artificial Sequence
  Description of Artificial Sequence: Synthetic peptide
SPSSHWKTPV

SEQ ID NO: 1586 - protein, 10 aa, Artificial Sequence
  Description of Artificial Sequence: Synthetic peptide
TALRCVFVPV

SEQ ID NO: 1587 - protein, 9 aa, Artificial Sequence
  Description of Artificial Sequence: Synthetic peptide
VIYWDGTAL

SEQ ID NO: 1588 - protein, 10 aa, Artificial Sequence
  Description of Artificial Sequence: Synthetic peptide
VIYWDGTALR

SEQ ID NO: 1589 - protein, 10 aa, Artificial Sequence
  Description of Artificial Sequence: Synthetic peptide
VLGETGAQRK

SEQ ID NO: 1590 - protein, 9 aa, Artificial Sequence
  Description of Artificial Sequence: Synthetic peptide
HPRPRHGHL

SEQ ID NO: 1591 - protein, 10 aa, Artificial Sequence
  Description of Artificial Sequence: Synthetic peptide
HPRPRHGHLQ

SEQ ID NO: 1592 - protein, 9 aa, Artificial Sequence
  Description of Artificial Sequence: Synthetic peptide
RPRHGHLQA

SEQ ID NO: 1593 - protein, 10 aa, Artificial Sequence
  Description of Artificial Sequence: Synthetic peptide
RPRHGHLQAV

SEQ ID NO: 1594 - protein, 10 aa, Artificial Sequence
  Description of Artificial Sequence: Synthetic peptide
GSLKTQVQMK

SEQ ID NO: 1595 - protein, 10 aa, Artificial Sequence
  Description of Artificial Sequence: Synthetic peptide
PPGPCHLLSL

SEQ ID NO: 1596 - protein, 10 aa, Artificial Sequence
  Description of Artificial Sequence: Synthetic peptide
RTILNNGSLK

SEQ ID NO: 1597 - protein, 9 aa, Artificial Sequence
  Description of Artificial Sequence: Synthetic peptide
SLKTQVQMK

SEQ ID NO: 1598 - protein, 10 aa, Artificial Sequence
  Description of Artificial Sequence: Synthetic peptide
SLKTQVQMKL

SEQ ID NO: 1599 - protein, 9 aa, Artificial Sequence
  Description of Artificial Sequence: Synthetic peptide
TILNNGSLK

SEQ ID NO: 1600 - protein, 10 aa, Artificial Sequence
  Description of Artificial Sequence: Synthetic peptide
CPPCRPKQWM

SEQ ID NO: 1601 - protein, 10 aa, Artificial Sequence
  Description of Artificial Sequence: Synthetic peptide
TTFCPPCRPK

SEQ ID NO: 1602 - protein, 10 aa, Artificial Sequence
  Description of Artificial Sequence: Synthetic peptide
CFANWPRPAL

SEQ ID NO: 1603 - protein, 9 aa, Artificial Sequence
  Description of Artificial Sequence: Synthetic peptide
FANWPRPAL

SEQ ID NO: 1604 - protein, 9 aa, Artificial Sequence
  Description of Artificial Sequence: Synthetic peptide
GLIPHPRPA

SEQ ID NO: 1605 - protein, 9 aa, Artificial Sequence
  Description of Artificial Sequence: Synthetic peptide
HPRPAPASA

SEQ ID NO: 1606 - protein, 10 aa, Artificial Sequence
  Description of Artificial Sequence: Synthetic peptide
HPRPAPASAP

SEQ ID NO: 1607 - protein, 9 aa, Artificial Sequence
  Description of Artificial Sequence: Synthetic peptide
IPHPRPAPA

SEQ ID NO: 1608 - protein, 10 aa, Artificial Sequence
  Description of Artificial Sequence: Synthetic peptide
IPHPRPAPAS

SEQ ID NO: 1609 - protein, 9 aa, Artificial Sequence
  Description of Artificial Sequence: Synthetic peptide
RPALCSCGL

SEQ ID NO: 1610 - protein, 10 aa, Artificial Sequence
  Description of Artificial Sequence: Synthetic peptide
RPALCSCGLI

SEQ ID NO: 1611 - protein, 9 aa, Artificial Sequence
  Description of Artificial Sequence: Synthetic peptide
TPLPSTRCF

SEQ ID NO: 1612 - protein, 9 aa, Artificial Sequence
  Description of Artificial Sequence: Synthetic peptide
WPRPALCSC

SEQ ID NO: 1613 - protein, 10 aa, Artificial Sequence
  Description of Artificial Sequence: Synthetic peptide
WPRPALCSCG

SEQ ID NO: 1614 - protein, 10 aa, Artificial Sequence
  Description of Artificial Sequence: Synthetic peptide
ALRRSGRPPK

SEQ ID NO: 1615 - protein, 9 aa, Artificial Sequence
  Description of Artificial Sequence: Synthetic peptide
GLVPSLVSK

SEQ ID NO: 1616 - protein, 9 aa, Artificial Sequence
  Description of Artificial Sequence: Synthetic peptide
KISVETYTV

SEQ ID NO: 1617 - protein, 10 aa, Artificial Sequence
  Description of Artificial Sequence: Synthetic peptide
LLMVLMSLDL

SEQ ID NO: 1618 - protein, 10 aa, Artificial Sequence
  Description of Artificial Sequence: Synthetic peptide
LMSLDLDTGL

SEQ ID NO: 1619 - protein, 9 aa, Artificial Sequence
  Description of Artificial Sequence: Synthetic peptide
LMVLMSLDL

SEQ ID NO: 1620 - protein, 10 aa, Artificial Sequence
  Description of Artificial Sequence: Synthetic peptide
LVSKCLILRV

SEQ ID NO: 1621 - protein, 9 aa, Artificial Sequence
  Description of Artificial Sequence: Synthetic peptide
QLLMVLMSL

SEQ ID NO: 1622 - protein, 9 aa, Artificial Sequence
  Description of Artificial Sequence: Synthetic peptide
RPGAADTGA

SEQ ID NO: 1623 - protein, 10 aa, Artificial Sequence
  Description of Artificial Sequence: Synthetic peptide
RPGAADTGAH

SEQ ID NO: 1624 - protein, 9 aa, Artificial Sequence
  Description of Artificial Sequence: Synthetic peptide
SLDLDTGLV

SEQ ID NO: 1625 - protein, 9 aa, Artificial Sequence
  Description of Artificial Sequence: Synthetic peptide
SLVSKCLIL

SEQ ID NO: 1626 - protein, 10 aa, Artificial Sequence
  Description of Artificial Sequence: Synthetic peptide
SQLLMVLMSL

SEQ ID NO: 1627 - protein, 9 aa, Artificial Sequence
  Description of Artificial Sequence: Synthetic peptide
TVSSQLLMV

SEQ ID NO: 1628 - protein, 9 aa, Artificial Sequence
  Description of Artificial Sequence: Synthetic peptide
TYTVSSQLL

SEQ ID NO: 1629 - protein, 10 aa, Artificial Sequence
  Description of Artificial Sequence: Synthetic peptide
TYTVSSQLLM

SEQ ID NO: 1630 - protein, 9 aa, Artificial Sequence
  Description of Artificial Sequence: Synthetic peptide
VLMSLDLDT

SEQ ID NO: 1631 - protein, 9 aa, Artificial Sequence
  Description of Artificial Sequence: Synthetic peptide
VPSLVSKCL

SEQ ID NO: 1632 - protein, 10 aa, Artificial Sequence
  Description of Artificial Sequence: Synthetic peptide
VSKCLILRVK

SEQ ID NO: 1633 - protein, 9 aa, Artificial Sequence
  Description of Artificial Sequence: Synthetic peptide
YTVSSQLLM

SEQ ID NO: 1634 - protein, 10 aa, Artificial Sequence
  Description of Artificial Sequence: Synthetic peptide
YTVSSQLLMV

SEQ ID NO: 1635 - protein, 9 aa, Artificial Sequence
  Description of Artificial Sequence: Synthetic peptide
FCQYHTASV

SEQ ID NO: 1636 - protein, 9 aa, Artificial Sequence
  Description of Artificial Sequence: Synthetic peptide
CPYGSTSTA

SEQ ID NO: 1637 - protein, 10 aa, Artificial Sequence
  Description of Artificial Sequence: Synthetic peptide
CPYGSTSTAS

SEQ ID NO: 1638 - protein, 10 aa, Artificial Sequence
  Description of Artificial Sequence: Synthetic peptide
LARAAASTAT

SEQ ID NO: 1639 - protein, 9 aa, Artificial Sequence
  Description of Artificial Sequence: Synthetic peptide
MLTDSLFLP

SEQ ID NO: 1640 - protein, 10 aa, Artificial Sequence
  Description of Artificial Sequence: Synthetic peptide
PPRSSSAIAV

SEQ ID NO: 1641 - protein, 10 aa, Artificial Sequence
  Description of Artificial Sequence: Synthetic peptide
RAAASTATEV

SEQ ID NO: 1642 - protein, 9 aa, Artificial Sequence
  Description of Artificial Sequence: Synthetic peptide
SPPRSSSAI

SEQ ID NO: 1643 - protein, 10 aa, Artificial Sequence
  Description of Artificial Sequence: Synthetic peptide
SPPRSSSAIA

SEQ ID NO: 1644 - protein, 9 aa, Artificial Sequence
  Description of Artificial Sequence: Synthetic peptide
SPTQRCRLA

SEQ ID NO: 1645 - protein, 9 aa, Artificial Sequence
  Description of Artificial Sequence: Synthetic peptide
TQRCRLARA

SEQ ID NO: 1646 - protein, 10 aa, Artificial Sequence
  Description of Artificial Sequence: Synthetic peptide
TQRCRLARAA

SEQ ID NO: 1647 - protein, 10 aa, Artificial Sequence
  Description of Artificial Sequence: Synthetic peptide
KIWKTTQMCR

SEQ ID NO: 1648 - protein, 9 aa, Artificial Sequence
  Description of Artificial Sequence: Synthetic peptide
WTSSGRSTK

SEQ ID NO: 1649 - protein, 9 aa, Artificial Sequence
  Description of Artificial Sequence: Synthetic peptide
ALGELARAL

SEQ ID NO: 1650 - protein, 9 aa, Artificial Sequence
  Description of Artificial Sequence: Synthetic peptide
AQLRRRAAA

SEQ ID NO: 1651 - protein, 10 aa, Artificial Sequence
  Description of Artificial Sequence: Synthetic peptide
AQLRRRAAAL

SEQ ID NO: 1652 - protein, 10 aa, Artificial Sequence
  Description of Artificial Sequence: Synthetic peptide
ARRAARMAQL

SEQ ID NO: 1653 - protein, 9 aa, Artificial Sequence
  Description of Artificial Sequence: Synthetic peptide
HPQLPRSPL

SEQ ID NO: 1654 - protein, 10 aa, Artificial Sequence
  Description of Artificial Sequence: Synthetic peptide
HPQLPRSPLA

SEQ ID NO: 1655 - protein, 9 aa, Artificial Sequence
  Description of Artificial Sequence: Synthetic peptide
LARALPGHL

SEQ ID NO: 1656 - protein, 10 aa, Artificial Sequence
  Description of Artificial Sequence: Synthetic peptide
LARALPGHLL

SEQ ID NO: 1657 - protein, 9 aa, Artificial Sequence
  Description of Artificial Sequence: Synthetic peptide
MAQLRRRAA

SEQ ID NO: 1658 - protein, 10 aa, Artificial Sequence
  Description of Artificial Sequence: Synthetic peptide
MAQLRRRAAA

SEQ ID NO: 1659 - protein, 9 aa, Artificial Sequence
  Description of Artificial Sequence: Synthetic peptide
QLRRRAAAL

SEQ ID NO: 1660 - protein, 10 aa, Artificial Sequence
  Description of Artificial Sequence: Synthetic peptide
RAAALPNAAA

SEQ ID NO: 1661 - protein, 10 aa, Artificial Sequence
  Description of Artificial Sequence: Synthetic peptide
RMAQLRRRAA

SEQ ID NO: 1662 - protein, 10 aa, Artificial Sequence
  Description of Artificial Sequence: Synthetic peptide
SQSARRAARM

SEQ ID NO: 1663 - protein, 10 aa, Artificial Sequence
  Description of Artificial Sequence: Synthetic peptide
GMTLGEKFRV

SEQ ID NO: 1664 - protein, 9 aa, Artificial Sequence
  Description of Artificial Sequence: Synthetic peptide
RVGNCKHLK

SEQ ID NO: 1665 - protein, 9 aa, Artificial Sequence
  Description of Artificial Sequence: Synthetic peptide
GPSEPGNNI

SEQ ID NO: 1666 - protein, 10 aa, Artificial Sequence
  Description of Artificial Sequence: Synthetic peptide
KICNESASRK

SEQ ID NO: 1667 - protein, 10 aa, Artificial Sequence
  Description of Artificial Sequence: Synthetic peptide
GIQVLNVSLK

SEQ ID NO: 1668 - protein, 9 aa, Artificial Sequence
  Description of Artificial Sequence: Synthetic peptide
IQVLNVSLK

SEQ ID NO: 1669 - protein, 9 aa, Artificial Sequence
  Description of Artificial Sequence: Synthetic peptide
KSSSNVISY

SEQ ID NO: 1670 - protein, 9 aa, Artificial Sequence
  Description of Artificial Sequence: Synthetic peptide
KYGWSLLRV

SEQ ID NO: 1671 - protein, 9 aa, Artificial Sequence
  Description of Artificial Sequence: Synthetic peptide
RSWKYGWSL

SEQ ID NO: 1672 - protein, 9 aa, Artificial Sequence
  Description of Artificial Sequence: Synthetic peptide
SLKSSSNVI

SEQ ID NO: 1673 - protein, 9 aa, Artificial Sequence
  Description of Artificial Sequence: Synthetic peptide
SWKYGWSLL

SEQ ID NO: 1674 - protein, 9 aa, Artificial Sequence
  Description of Artificial Sequence: Synthetic peptide
TVANGRSWK

SEQ ID NO: 1675 - protein, 9 aa, Artificial Sequence
  Description of Artificial Sequence: Synthetic peptide
VPQVNGIQV

SEQ ID NO: 1676 - protein, 10 aa, Artificial Sequence
  Description of Artificial Sequence: Synthetic peptide
VPQVNGIQVL

SEQ ID NO: 1677 - protein, 10 aa, Artificial Sequence
  Description of Artificial Sequence: Synthetic peptide
VTVANGRSWK

SEQ ID NO: 1678 - protein, 9 aa, Artificial Sequence
  Description of Artificial Sequence: Synthetic peptide
WSLLRVPQV

SEQ ID NO: 1679 - protein, 10 aa, Artificial Sequence
  Description of Artificial Sequence: Synthetic peptide
HPGDCLIFKL

SEQ ID NO: 1680 - protein, 9 aa, Artificial Sequence
  Description of Artificial Sequence: Synthetic peptide
KLRVPGSSV

SEQ ID NO: 1681 - protein, 10 aa, Artificial Sequence
  Description of Artificial Sequence: Synthetic peptide
KLRVPGSSVL

SEQ ID NO: 1682 - protein, 9 aa, Artificial Sequence
  Description of Artificial Sequence: Synthetic peptide
RVPGSSVLV

SEQ ID NO: 1683 - protein, 9 aa, Artificial Sequence
  Description of Artificial Sequence: Synthetic peptide
SVLVTVPGL

SEQ ID NO: 1684 - protein, 10 aa, Artificial Sequence
  Description of Artificial Sequence: Synthetic peptide
VPGSSVLVTV

SEQ ID NO: 1685 - protein, 10 aa, Artificial Sequence
  Description of Artificial Sequence: Synthetic peptide
ALLLRPRPPR

SEQ ID NO: 1686 - protein, 10 aa, Artificial Sequence
  Description of Artificial Sequence: Synthetic peptide
ALSALLLRPR

SEQ ID NO: 1687 - protein, 9 aa, Artificial Sequence
  Description of Artificial Sequence: Synthetic peptide
LTINKEEAL

SEQ ID NO: 1688 - protein, 9 aa, Artificial Sequence
  Description of Artificial Sequence: Synthetic peptide
IVHSATGFK

SEQ ID NO: 1689 - protein, 9 aa, Artificial Sequence
  Description of Artificial Sequence: Synthetic peptide
ATGFKQSSK

SEQ ID NO: 1690 - protein, 9 aa, Artificial Sequence
  Description of Artificial Sequence: Synthetic peptide
ELFPLIFPA

SEQ ID NO: 1691 - protein, 9 aa, Artificial Sequence
  Description of Artificial Sequence: Synthetic peptide
KGPELFPLI

SEQ ID NO: 1692 - protein, 10 aa, Artificial Sequence
  Description of Artificial Sequence: Synthetic peptide
KGPELFPLIF

SEQ ID NO: 1693 - protein, 11 aa, Artificial Sequence
  Description of Artificial Sequence: Synthetic peptide
KPTDAPPKAGV

SEQ ID NO: 1694 - protein, 10 aa, Artificial Sequence
  Description of Artificial Sequence: Synthetic peptide
ALEEKKGNYV

SEQ ID NO: 1695 - protein, 10 aa, Artificial Sequence
  Description of Artificial Sequence: Synthetic peptide
IQLQDKFEHL

SEQ ID NO: 1696 - protein, 9 aa, Artificial Sequence
  Description of Artificial Sequence: Synthetic peptide
QLQDKFEHL

SEQ ID NO: 1697 - protein, 10 aa, Artificial Sequence
  Description of Artificial Sequence: Synthetic peptide
QLQDKFEHLK

SEQ ID NO: 1698 - protein, 10 aa, Artificial Sequence
  Description of Artificial Sequence: Synthetic peptide
YLVIQLQDKF

SEQ ID NO: 1699 - protein, 10 aa, Artificial Sequence
  Description of Artificial Sequence: Synthetic peptide
QVYRRKHQEL

SEQ ID NO: 1700 - protein, 9 aa, Artificial Sequence
  Description of Artificial Sequence: Synthetic peptide
STREKNSQV

SEQ ID NO: 1701 - protein, 9 aa, Artificial Sequence
  Description of Artificial Sequence: Synthetic peptide
VYRRKHQEL

SEQ ID NO: 1702 - protein, 9 aa, Artificial Sequence
  Description of Artificial Sequence: Synthetic peptide
VLTVTSTDV

SEQ ID NO: 1703 - protein, 10 aa, Artificial Sequence
  Description of Artificial Sequence: Synthetic peptide
VLTVTSTDVK

SEQ ID NO: 1704 - protein, 9 aa, Artificial Sequence
  Description of Artificial Sequence: Synthetic peptide
IMSLWGLVS

SEQ ID NO: 1705 - protein, 10 aa, Artificial Sequence
  Description of Artificial Sequence: Synthetic peptide
IMSLWGLVSK

SEQ ID NO: 1706 - protein, 9 aa, Artificial Sequence
  Description of Artificial Sequence: Synthetic peptide
KLKQEATSK

SEQ ID NO: 1707 - protein, 9 aa, Artificial Sequence
  Description of Artificial Sequence: Synthetic peptide
QIMSLWGLV

SEQ ID NO: 1708 - protein, 9 aa, Artificial Sequence
  Description of Artificial Sequence: Synthetic peptide
SQIMSLWGL

SEQ ID NO: 1709 - protein, 10 aa, Artificial Sequence
  Description of Artificial Sequence: Synthetic peptide
SQIMSLWGLV

SEQ ID NO: 1710 - protein, 9 aa, Artificial Sequence
  Description of Artificial Sequence: Synthetic peptide
TSKSQIMSL

SEQ ID NO: 1711 - protein, 10 aa, Artificial Sequence
  Description of Artificial Sequence: Synthetic peptide
LLQEFDVQEA

SEQ ID NO: 1712 - protein, 10 aa, Artificial Sequence
  Description of Artificial Sequence: Synthetic peptide
LQEFDVQEAL

SEQ ID NO: 1713 - protein, 9 aa, Artificial Sequence
  Description of Artificial Sequence: Synthetic peptide
GPREPRNRT

SEQ ID NO: 1714 - protein, 10 aa, Artificial Sequence
  Description of Artificial Sequence: Synthetic peptide
RNRTEKHSTM

SEQ ID NO: 1715 - protein, 10 aa, Artificial Sequence
  Description of Artificial Sequence: Synthetic peptide
ALNSEALSVV

SEQ ID NO: 1716 - protein, 10 aa, Artificial Sequence
  Description of Artificial Sequence: Synthetic peptide
MALNSEALSV

SEQ ID NO: 1717 - protein, 67 aa, Artificial Sequence
  Description of Artificial Sequence: Synthetic polypeptide
MSDVAIVKEGWLHKRGKYIKTWRPRYFLLKNDGTFIGYKERPQDVDQREAPLNNFSVAQCQLMKTER

SEQ ID NO: 1718 - protein, 101 aa, Artificial Sequence
  Description of Artificial Sequence: Synthetic polypeptide
TMLVLEGSGNLVLYTGVVRVGKVFIPGLPAPSLTMSNTMPRPSTPLDGVSAPKPLSKLLGSLDEVVLLSPVPELRDSSKLHDSLYNEDCTFQQLGTYIHSI

SEQ ID NO: 1719 - protein, 90 aa, Artificial Sequence
  Description of Artificial Sequence: Synthetic polypeptide
MREPIYMHSTMVFLPWELHTKKGPSPPEQFMAVKLSDSRTALKSGYGKYLGINSDELVGHSDAIGPREQWEPVFQNGKMALLASNSCFIR

SEQ ID NO: 1720 - protein, 101 aa, Artificial Sequence
  Description of Artificial Sequence: Synthetic polypeptide
AMPNQAQMRILKETELRKVKVLGSGAFGTVYKGIWIPDGENVKIPVAIKVSRENTSPKANKEILDEAYVMAGVGSPYVSRLLGICLTSTVQLVTQLMPYGC

SEQ ID NO: 1721 - protein, 62 aa, Artificial Sequence
  Description of Artificial Sequence: Synthetic polypeptide
MTEYKLVVVGACGVGKSALTIQLIQNHFVDEYDPTIEDSYRKQVVIDGETCLLDILDTAGQE

SEQ ID NO: 1722 - protein, 62 aa, Artificial Sequence
  Description of Artificial Sequence: Synthetic polypeptide
MTEYKLVVVGADGVGKSALTIQLIQNHFVDEYDPTIEDSYRKQVVIDGETCLLDILDTAGQE

SEQ ID NO: 1723 - protein, 62 aa, Artificial Sequence
  Description of Artificial Sequence: Synthetic polypeptide
MTEYKLVVVGAVGVGKSALTIQLIQNHFVDEYDPTIEDSYRKQVVIDGETCLLDILDTAGQE

SEQ ID NO: 1724 - protein, 101 aa, Artificial Sequence
  Description of Artificial Sequence: Synthetic polypeptide
AGGVGKSALTIQLIQNHFVDEYDPTIEDSYRKQVVIDGETCLLDILDTAGHEEYSAMRDQYMRTGEGFLCVFAINNTKSFEDIHHYREQIKRVKDSEDVPM

SEQ ID NO: 1725 - protein, 101 aa, Artificial Sequence
  Description of Artificial Sequence: Synthetic polypeptide
AGGVGKSALTIQLIQNHFVDEYDPTIEDSYRKQVVIDGETCLLDILDTAGLEEYSAMRDQYMRTGEGFLCVFAINNTKSFEDIHHYREQIKRVKDSEDVPM

SEQ ID NO: 1726 - protein, 101 aa, Artificial Sequence
  Description of Artificial Sequence: Synthetic polypeptide
AGGVGKSALTIQLIQNHFVDEYDPTIEDSYRKQVVIDGETCLLDILDTAGKEEYSAMRDQYMRTGEGFLCVFAINNSKSFADINLYREQIKRVKDSDDVPM

SEQ ID NO: 1727 - protein, 101 aa, Artificial Sequence
  Description of Artificial Sequence: Synthetic polypeptide
AGGVGKSALTIQLIQNHFVDEYDPTIEDSYRKQVVIDGETCLLDILDTAGREEYSAMRDQYMRTGEGFLCVFAINNSKSFADINLYREQIKRVKDSDDVPM

SEQ ID NO: 1728 - protein, 101 aa, Artificial Sequence
  Description of Artificial Sequence: Synthetic polypeptide
AVCKSKKSWQARHTGIKIVQQIAILMGCAILPHLRSLVEIIEHGLVDEQQEVRTISALAIAALAEAATPYGIESFDSVLKPLWKGIRQHRGKGLAAFLKAI

SEQ ID NO: 1729 - protein, 101 aa, Artificial Sequence
  Description of Artificial Sequence: Synthetic polypeptide
YLSLYLLLVSCPKSEVRAKFKFSILNAKGEETKAMESQRAYRFVQGKDWGLKKFIRRDFLLDEANGLLPDDKLTLFCEVSVVQDSVNISGQNTMNMVKVPE

SEQ ID NO: 1730 - protein, 101 aa, Artificial Sequence
  Description of Artificial Sequence: Synthetic polypeptide
YLSLYLLLVSCPKSEVRAKFKFSILNAKGEETKAMESQRAYRFVQGKDWGVKKFIRRDFLLDEANGLLPDDKLTLFCEVSVVQDSVNISGQNTMNMVKVPE

SEQ ID NO: 1731 - protein, 101 aa, Artificial Sequence
  Description of Artificial Sequence: Synthetic polypeptide
PEVGSDCTTIHYNYMCNSSCMGGMNRRPILTIITLEDSSGNLLGRNSFEVHVCACPGRDRRTEEENLRKKGEPHHELPPGSTKRALPNNTSSSPQPKKKPL

SEQ ID NO: 1732 - protein, 101 aa, Artificial Sequence
  Description of Artificial Sequence: Synthetic polypeptide
TEVVRRCPHHERCSDSDGLAPPQHLIRVEGNLRVEYLDDRNTFRHSVVVPCEPPEVGSDCTTIHYNYMCNSSCMGGMNRRPILTIITLEDSSGNLLGRNSF

SEQ ID NO: 1733 - protein, 54 aa, Artificial Sequence
  Description of Artificial Sequence: Synthetic polypeptide
YNFDKNYKDWQSAVECIAVLDVLLCLANYSRGGDGPMCRPVILLPEDTPPLLRA

SEQ ID NO: 1734 - protein, 67 aa, Artificial Sequence
  Description of Artificial Sequence: Synthetic polypeptide
RSYRRMIHLWWTAQISLGVCRSLTVACCTGGLVGGTPLSISRPTSRARQSCCLPGLTHPAHQPLGSM

SEQ ID NO: 1735 - protein, 60 aa, Artificial Sequence
  Description of Artificial Sequence: Synthetic polypeptide
QHSGRDVSLRGLSCARATLSFWPGGYPAYSKDSGLLTSSSREWKVKFPELLCVWVSSIRH

SEQ ID NO: 1736 - protein, 48 aa, Artificial Sequence
  Description of Artificial Sequence: Synthetic polypeptide
AQAKAVCSQESRDVLCELSDHHNHTLEEECQWGPCLQCLWALLQASQY

SEQ ID NO: 1737 - protein, 35 aa, Artificial Sequence
  Description of Artificial Sequence: Synthetic polypeptide
GPRSHPLPRLWHLLLQVTQTSFALAPTLTHMLSPH

SEQ ID NO: 1738 - protein, 172 aa, Artificial Sequence
  Description of Artificial Sequence: Synthetic polypeptide
PLGLVPWTRWCPQGKPRFPAMSTTTATGTTTTKSGSSGMAGSLAQKPESPSPGLLFLGHSPSQSHLLLISKSPDPTQQPLRGGSLTHSAPGPSLSQPLAQLTPPASAPVPAVCSTCKNPASLPDTHRGKGGGVPPSPPLALGPRMQLCTQLARFFPITPPVWHILGPQRHTP

SEQ ID NO: 1739 - protein, 77 aa, Artificial Sequence
  Description of Artificial Sequence: Synthetic polypeptide
SQGLYSSSASSGKCLMEVTVDRNCLEVLPTKMSYAANLKNVMNMQNRQKKKGKNSPCCQKKLRVQNQGHLLMILLHN

SEQ ID NO: 1740 - protein, 104 aa, Artificial Sequence
  Description of Artificial Sequence: Synthetic polypeptide
LGSGAFGTVYKGIWIPDGENVKIPVAIKVLRENTSPKANKEILDEAYVMAYVMAGVGSPYVSRLLGICLTSTVQLVTQLMPYGCLLDHVRENRGRLGSQDLLNW

SEQ ID NO: 1741 - protein, 10 aa, Artificial Sequence
  Description of Artificial Sequence: Synthetic peptide
KYIKTWRPRY

SEQ ID NO: 1742 - protein, 9 aa, Artificial Sequence
  Description of Artificial Sequence: Synthetic peptide
WLHKRGKYI

SEQ ID NO: 1743 - protein, 10 aa, Artificial Sequence
  Description of Artificial Sequence: Synthetic peptide
WLHKRGKYIK

SEQ ID NO: 1744 - protein, 9 aa, Artificial Sequence
  Description of Artificial Sequence: Synthetic peptide
APKPLSKLL

SEQ ID NO: 1745 - protein, 10 aa, Artificial Sequence
  Description of Artificial Sequence: Synthetic peptide
GVSAPKPLSK

SEQ ID NO: 1746 - protein, 9 aa, Artificial Sequence
  Description of Artificial Sequence: Synthetic peptide
VSAPKPLSK

SEQ ID NO: 1747 - protein, 9 aa, Artificial Sequence
  Description of Artificial Sequence: Synthetic peptide
KLSDSRTAL

SEQ ID NO: 1748 - protein, 10 aa, Artificial Sequence
  Description of Artificial Sequence: Synthetic peptide
KLSDSRTALK

SEQ ID NO: 1749 - protein, 9 aa, Artificial Sequence
  Description of Artificial Sequence: Synthetic peptide
LSDSRTALK

SEQ ID NO: 1750 - protein, 10 aa, Artificial Sequence
  Description of Artificial Sequence: Synthetic peptide
RTALKSGYGK

SEQ ID NO: 1751 - protein, 9 aa, Artificial Sequence
  Description of Artificial Sequence: Synthetic peptide
TALKSGYGK

SEQ ID NO: 1752 - protein, 10 aa, Artificial Sequence
  Description of Artificial Sequence: Synthetic peptide
ALSASNSCFI

SEQ ID NO: 1753 - protein, 10 aa, Artificial Sequence
  Description of Artificial Sequence: Synthetic peptide
KVSRENTSPK

SEQ ID NO: 1754 - protein, 9 aa, Artificial Sequence
  Description of Artificial Sequence: Synthetic peptide
LVVVGACGV

SEQ ID NO: 1755 - protein, 9 aa, Artificial Sequence
  Description of Artificial Sequence: Synthetic peptide
VVGACGVGK

SEQ ID NO: 1756 - protein, 10 aa, Artificial Sequence
  Description of Artificial Sequence: Synthetic peptide
VVVGACGVGK

SEQ ID NO: 1757 - protein, 9 aa, Artificial Sequence
  Description of Artificial Sequence: Synthetic peptide
VVGADGVGK

SEQ ID NO: 1758 - protein, 10 aa, Artificial Sequence
  Description of Artificial Sequence: Synthetic peptide
VVVGADGVGK

SEQ ID NO: 1759 - protein, 10 aa, Artificial Sequence
  Description of Artificial Sequence: Synthetic peptide
KLVVVGADGV

SEQ ID NO: 1760 - protein, 9 aa, Artificial Sequence
  Description of Artificial Sequence: Synthetic peptide
LVVVGADGV

SEQ ID NO: 1761 - protein, 10 aa, Artificial Sequence
  Description of Artificial Sequence: Synthetic peptide
KLVVVGAVGV

SEQ ID NO: 1762 - protein, 9 aa, Artificial Sequence
  Description of Artificial Sequence: Synthetic peptide
LVVVGAVGV

SEQ ID NO: 1763 - protein, 9 aa, Artificial Sequence
  Description of Artificial Sequence: Synthetic peptide
VVGAVGVGK

SEQ ID NO: 1764 - protein, 10 aa, Artificial Sequence
  Description of Artificial Sequence: Synthetic peptide
VVVGAVGVGK

SEQ ID NO: 1765 - protein, 10 aa, Artificial Sequence
  Description of Artificial Sequence: Synthetic peptide
ILDTAGHEEY

SEQ ID NO: 1766 - protein, 10 aa, Artificial Sequence
  Description of Artificial Sequence: Synthetic peptide
ILDTAGLEEY

SEQ ID NO: 1767 - protein, 10 aa, Artificial Sequence
  Description of Artificial Sequence: Synthetic peptide
LLDILDTAGL

SEQ ID NO: 1768 - protein, 10 aa, Artificial Sequence
  Description of Artificial Sequence: Synthetic peptide
ILDTAGKEEY

SEQ ID NO: 1769 - protein, 10 aa, Artificial Sequence
  Description of Artificial Sequence: Synthetic peptide
ILDTAGREEY

SEQ ID NO: 1770 - protein, 9 aa, Artificial Sequence
  Description of Artificial Sequence: Synthetic peptide
GLVDEQQEV

SEQ ID NO: 1771 - protein, 9 aa, Artificial Sequence
  Description of Artificial Sequence: Synthetic peptide
FVQGKDWGL

SEQ ID NO: 1772 - protein, 9 aa, Artificial Sequence
  Description of Artificial Sequence: Synthetic peptide
FVQGKDWGV

SEQ ID NO: 1773 - protein, 9 aa, Artificial Sequence
  Description of Artificial Sequence: Synthetic peptide
NSFEVHVCA

SEQ ID NO: 1774 - protein, 9 aa, Artificial Sequence
  Description of Artificial Sequence: Synthetic peptide
VVPCEPPEV

SEQ ID NO: 1775 - protein, 10 aa, Artificial Sequence
  Description of Artificial Sequence: Synthetic peptide
VVVPCEPPEV

SEQ ID NO: 1776 - protein, 10 aa, Artificial Sequence
  Description of Artificial Sequence: Synthetic peptide
ILLPEDTPPL

SEQ ID NO: 1777 - protein, 9 aa, Artificial Sequence
  Description of Artificial Sequence: Synthetic peptide
LLPEDTPPL

SEQ ID NO: 1778 - protein, 9 aa, Artificial Sequence
  Description of Artificial Sequence: Synthetic peptide
CLPGLTHPA

SEQ ID NO: 1779 - protein, 10 aa, Artificial Sequence
  Description of Artificial Sequence: Synthetic peptide
GLTHPAHQPL

SEQ ID NO: 1780 - protein, 10 aa, Artificial Sequence
  Description of Artificial Sequence: Synthetic peptide
HPAHQPLGSM

SEQ ID NO: 1781 - protein, 9 aa, Artificial Sequence
  Description of Artificial Sequence: Synthetic peptide
LTHPAHQPL

SEQ ID NO: 1782 - protein, 10 aa, Artificial Sequence
  Description of Artificial Sequence: Synthetic peptide
RPTSRARQSC

SEQ ID NO: 1783 - protein, 9 aa, Artificial Sequence
  Description of Artificial Sequence: Synthetic peptide
RQSCCLPGL

SEQ ID NO: 1784 - protein, 10 aa, Artificial Sequence
  Description of Artificial Sequence: Synthetic peptide
TSRARQSCCL

SEQ ID NO: 1785 - protein, 9 aa, Artificial Sequence
  Description of Artificial Sequence: Synthetic peptide
CLQCLWALL

SEQ ID NO: 1786 - protein, 10 aa, Artificial Sequence
  Description of Artificial Sequence: Synthetic peptide
CQWGPCLQCL

SEQ ID NO: 1787 - protein, 9 aa, Artificial Sequence
  Description of Artificial Sequence: Synthetic peptide
QWGPCLQCL

SEQ ID NO: 1788 - protein, 10 aa, Artificial Sequence
  Description of Artificial Sequence: Synthetic peptide
QWGPCLQCLW

SEQ ID NO: 1789 - protein, 10 aa, Artificial Sequence
  Description of Artificial Sequence: Synthetic peptide
GPRGRTCHPG

SEQ ID NO: 1790 - protein, 9 aa, Artificial Sequence
  Description of Artificial Sequence: Synthetic peptide
ALAPTLTHM

SEQ ID NO: 1791 - protein, 10 aa, Artificial Sequence
  Description of Artificial Sequence: Synthetic peptide
ALAPTLTHML

SEQ ID NO: 1792 - protein, 10 aa, Artificial Sequence
  Description of Artificial Sequence: Synthetic peptide
LLQVTQTSFA

SEQ ID NO: 1793 - protein, 10 aa, Artificial Sequence
  Description of Artificial Sequence: Synthetic peptide
LQVTQTSFAL

SEQ ID NO: 1794 - protein, 9 aa, Artificial Sequence
  Description of Artificial Sequence: Synthetic peptide
RLWHLLLQV

SEQ ID NO: 1795 - protein, 10 aa, Artificial Sequence
  Description of Artificial Sequence: Synthetic peptide
RLWHLLLQVT

SEQ ID NO: 1796 - protein, 10 aa, Artificial Sequence
  Description of Artificial Sequence: Synthetic peptide
CTQLARFFPI

SEQ ID NO: 1797 - protein, 9 aa, Artificial Sequence
  Description of Artificial Sequence: Synthetic peptide
FFPITPPVW

SEQ ID NO: 1798 - protein, 10 aa, Artificial Sequence
  Description of Artificial Sequence: Synthetic peptide
FPITPPVWHI

SEQ ID NO: 1799 - protein, 10 aa, Artificial Sequence
  Description of Artificial Sequence: Synthetic peptide
GPRMQLCTQL

SEQ ID NO: 1800 - protein, 9 aa, Artificial Sequence
  Description of Artificial Sequence: Synthetic peptide
ITPPVWHIL

SEQ ID NO: 1801 - protein, 9 aa, Artificial Sequence
  Description of Artificial Sequence: Synthetic peptide
LALGPRMQL

SEQ ID NO: 1802 - protein, 10 aa, Artificial Sequence
  Description of Artificial Sequence: Synthetic peptide
MQLCTQLARF

SEQ ID NO: 1803 - protein, 9 aa, Artificial Sequence
  Description of Artificial Sequence: Synthetic peptide
RFFPITPPV

SEQ ID NO: 1804 - protein, 10 aa, Artificial Sequence
  Description of Artificial Sequence: Synthetic peptide
RFFPITPPVW

SEQ ID NO: 1805 - protein, 9 aa, Artificial Sequence
  Description of Artificial Sequence: Synthetic peptide
RMQLCTQLA

SEQ ID NO: 1806 - protein, 10 aa, Artificial Sequence
  Description of Artificial Sequence: Synthetic peptide
RMQLCTQLAR

SEQ ID NO: 1807 - protein, 10 aa, Artificial Sequence
  Description of Artificial Sequence: Synthetic peptide
SPPLALGPRM

SEQ ID NO: 1808 - protein, 9 aa, Artificial Sequence
  Description of Artificial Sequence: Synthetic peptide
TQLARFFPI

SEQ ID NO: 1809 - protein, 9 aa, Artificial Sequence
  Description of Artificial Sequence: Synthetic peptide
RVQNQGHLL

SEQ ID NO: 1810 - protein, 10 aa, Artificial Sequence
  Description of Artificial Sequence: Synthetic peptide
ILDEAYVMAY

SEQ ID NO: 1811 - protein, 9 aa, Artificial Sequence
  Description of Artificial Sequence: Synthetic peptide
VMAYVMAGV

SEQ ID NO: 1812 - protein, 9 aa, Artificial Sequence
  Description of Artificial Sequence: Synthetic peptide
YVMAYVMAG

SEQ ID NO: 1813 - protein, 10 aa, Artificial Sequence
  Description of Artificial Sequence: Synthetic peptide
YVMAYVMAGV

SEQ ID NO: 1814 - protein, 4 aa, Artificial Sequence
  Description of Artificial Sequence: Synthetic peptide
AVEW

SEQ ID NO: 1815 - protein, 4 aa, Artificial Sequence
  Description of Artificial Sequence: Synthetic peptide
VHPA

SEQ ID NO: 1816 - protein, 4 aa, Artificial Sequence
  Description of Artificial Sequence: Synthetic peptide
MPAV

SEQ ID NO: 1817 - protein, 4 aa, Artificial Sequence
  Description of Artificial Sequence: Synthetic peptide
SIRH

SEQ ID NO: 1818 - protein, 4 aa, Artificial Sequence
  Description of Artificial Sequence: Synthetic peptide
SQIS

SEQ ID NO: 1819 - protein, 4 aa, Artificial Sequence
  Description of Artificial Sequence: Synthetic peptide
CSNH

SEQ ID NO: 1820 - protein, 4 aa, Artificial Sequence
  Description of Artificial Sequence: Synthetic peptide
YHEA

SEQ ID NO: 1821 - protein, 4 aa, Artificial Sequence
  Description of Artificial Sequence: Synthetic peptide
YVMA

SEQ ID NO: 1822 - protein, 4 aa, Artificial Sequence
  Description of Artificial Sequence: Synthetic peptide
LSPH

SEQ ID NO: 1823 - protein, 4 aa, Artificial Sequence
  Description of Artificial Sequence: Synthetic peptide
CRLS

SEQ ID NO: 1824 - protein, 4 aa, Artificial Sequence
  Description of Artificial Sequence: Synthetic peptide
RHTP

SEQ ID NO: 1825 - protein, 4 aa, Artificial Sequence
  Description of Artificial Sequence: Synthetic peptide
AAVG

SEQ ID NO: 1826 - protein, 4 aa, Artificial Sequence
  Description of Artificial Sequence: Synthetic peptide
AWAA

SEQ ID NO: 1827 - protein, 4 aa, Artificial Sequence
  Description of Artificial Sequence: Synthetic peptide
CSES

SEQ ID NO: 1828 - protein, 4 aa, Artificial Sequence
  Description of Artificial Sequence: Synthetic peptide
QPSL

SEQ ID NO: 1829 - protein, 4 aa, Artificial Sequence
  Description of Artificial Sequence: Synthetic peptide
SHST

SEQ ID NO: 1830 - protein, 4 aa, Artificial Sequence
  Description of Artificial Sequence: Synthetic peptide
QCIL

SEQ ID NO: 1831 - protein, 9 aa, Artificial Sequence
  Description of Artificial Sequence: Synthetic peptide
SLMPAHWSI

SEQ ID NO: 1832 - protein, 10 aa, Artificial Sequence
  Description of Artificial Sequence: Synthetic peptide
LSLMPAHWSI

SEQ ID NO: 1833 - protein, 9 aa, Artificial Sequence
  Description of Artificial Sequence: Synthetic peptide
FQMQPLSLM

SEQ ID NO: 1834 - protein, 6 aa, Artificial Sequence
  Description of Artificial Sequence: Synthetic 6xHis tag
HHHHHH

1-294. (canceled)

295. A method of treating cancer in a subject in need thereof comprising administering to the subject a pharmaceutical composition comprising:
(i) a recombinant or synthetic HLA-matched neoantigenic peptide or a polynucleotide encoding the recombinant neoantigenic peptide; and
(ii) a pharmaceutically acceptable excipient;
wherein the neoantigenic peptide comprises a tumor-specific neoepitope comprising one or more contiguous mutant amino acids encoded by a frameshift, wherein the tumor-specific neoepitope is encoded by a gene of cancer cells of the subject or expressed by cancer cells of the subject and is not expressed by a gene of non-cancer cells of the subject or is not encoded by a gene of the non-cancer cells, wherein the tumor-specific neoepitope comprises an amino acid sequence represented by:
AₓB_{y}C_{z},
wherein:
x is 0 or at least 1 and each A is an amino acid encoded by the gene of the cancer cells of the subject and the gene of the non-cancer cells of the subject;
B_{y} is absent;
z is at least 1 and each C represents the one or more contiguous mutant amino acids encoded by the frameshift;
x+y+z is at least 8;
and
the gene encoding the tumor-specific neoepitope is a gene selected from the group consisting of:
(a) APC, wherein C_{z} comprises one or more contiguous amino acids of
(i)
AKFQQCHSTLEPNPADCRVLVYLQNQPGTKLLNFLQERNLPPKVVLRH
PKVHLNTMFRRPHSCLADVLLSVHLIVLRVVRLPAPFRVNHAVEW,
(ii)
APVIFQIALDKPCHQAEVKHLHHLLKQLKPSEKYLKIKHLLLKRERVDL
SKLQ,
or
(iii)
MLQFRGSRFFQMLILYYILPRKVLQMDFLVHPA;
(b) β2M, wherein C_{z} comprises one or more contiguous amino acids of
(i)
RMERELKKWSIQTCLSARTGLSISCTTLNSPPLKKMSMPAV,
or
(ii
LCSRYSLFLAWRLSSVLQRFRFTHVIQQRMESQIS;
(c) GATA3, wherein Cz comprises one or more contiguous amino acids of
(i)
PGRPLQTHVLPEPHLALQPLQPHADHAHADAPAIQPVLWTTPPLQHGHR
HGLEPCSMLTGPPARVPAVPFDLHFCRSSIMKPKRDGYMFLKAESKIMF
ATLQRSSLWCLCSNH;
or
(ii)
PRPRRCTRHPACPLDHTTPPAWSPPWVRALLDAHRAPSESPCSPFRLAFL
QEQYHEA;
(d) TP53, wherein Cz comprises one or more contiguous amino acids of
(i)
SSQNARGCSPRGPCTSSSYTGGPCTSPLLAPVIFCPFPENLPGQLRFPS
GLLAFWDSQVCDLHVLPCPQQDVLPTGQDLPCAAVG,
(ii)
GAAPTMSAAQIAMVWPLLSILSEWKEICVWSIWMTETLFDIVWWCPMS
RLRLALTVPPSTTTTCVTVPAWAA,
(iii)
TGGPSSPSSHWKTPVVIYWDGTALRCVFVPVLGETGAQRKRISARKGSL
TTSCPQGALSEHCPTTPAPLPSQRRNHWMENISPFRSVGVSASRCSES,
(iv)
FHTPARHPRPRHGHLQAVTAHDGGCEALPPP,
(v)
CCPRTILNNGSLKTQVQMKLPECQRLLPPWPLHQQLLHRRPLHQPPPGP
CHLLSLPRKPTRAATVSVWASCILGQPSL,
(vi)
VRKHFQTYGNYFLKTTFCPPCRPKQWMI,
or
(vii)
LARTPLPSTRCFANWPRPALCSCGLIPHPRPAPASAPWPSTSSHST;
or,
(e) VHL wherein C_{z} comprises one or more contiguous amino acids of
(i)
ELQETGHRQVALRRSGRPPKCAERPGAADTGAHCTSTDGRLKISVETYT
VSSQLLMVLMSLDLDTGLVPSLVSKCLILRVK,
(ii)
KSDASRLSGA,
(iii)
RTAYFCQYHTASVYSERAMPPGCPEPSQA,
(iv)
TRASPPRSSSAIAVRASCCPYGSTSTASRSPTQRCRLARAAASTATEVTF
GSSEMQGHTMGFWLTKLNYLCHLSMLTDSLFLPISHCQCIL,
(v)
SSLRITGDWTSSGRSTKIWKTTQMCRKTWSG,
or
(vi)
RRRRGGVGRRGVRPGRVRPGGTGRRGGDGGRAAAARAALGELARALP
GHLLQSQSARRAARMAQLRRRAAALPNAAAWHGPPHPQLPRSPLALQ
RCRDTRWASG;
and
wherein the neoantigenic peptide is from 8 to 100 amino acids in length.

296. The method of claim 295, wherein the gene encoding the tumor-specific neoepitope is GATA3, wherein C_{z} comprises one or more contiguous amino acids of
PRPRRCTRHPACPLDHTTPPAWSPPWVRALLDAHRAPSESPCSPFRLAF
LQEQYHEA.

297. The method of claim 295, wherein Cz comprises one or more contiguous amino acids of
PGRPLQTHVLPEPHLALQPLQPHADHAHADAPAIQPVLWTTPPLQHGHR
HGLEP CSMLTGPPARVPAVPFDLHFCRSSIMKPKRDGYMFLKAESKIM
FATLQRSSLWCLCSNH.

298. (canceled)

299. The method of claim 295, wherein the tumor-specific neoepitope binds to a MHC class I molecule with a binding affinity of 500 nM or less.

300. The method of claim 295, wherein the pharmaceutical composition comprises at least two different neoantigenic peptides, wherein the gene encoding the tumor-specific neoepitope of each of the at least two different neoantigenic peptides is GATA3.

301. The method of claim 297, wherein the tumor-specific neoepitope has a sequence of HVLPEPHLAL (SEQ ID NO: 1428), RPLQTHVLPE (SEQ ID NO: 1429), or VLWTTPPLQH (SEQ ID NO: 1430).

302. The method of claim 301, wherein the tumor-specific neoepitope has a sequence of VLWTTPPLQH (SEQ ID NO: 1430) and the subject express an MHC molecule encoded by a A03:01 HLA allele.

303. The method of claim 297, wherein the tumor-specific neoepitope has a sequence of EPHLALQPL (SEQ ID NO: 529) and the subject express an MHC molecule encoded by a B07:02 or B08:01 HLA allele.

304. The method of claim 297, wherein the tumor-specific neoepitope has a sequence of FLKAESKIMF (SEQ ID NO: 536) and the subject express an MHC molecule encoded by a B08:01 HLA allele.

305. The method of claim 297, wherein the tumor-specific neoepitope has a sequence of IMKPKRDGYM (SEQ ID NO: 550) and the subject express an MHC molecule encoded by a B08:01 HLA allele.

306. The method of claim 297, wherein the tumor-specific neoepitope has a sequence of LHFCRSSIM (SEQ ID NO: 556) and the subject express an MHC molecule encoded by a B08:01 HLA allele.

307. The method of claim 297, wherein the tumor-specific neoepitope has a sequence of MFATLQRSSL (SEQ ID NO: 567) and the subject express an MHC molecule encoded by a B07:02 or B08:01 HLA allele.

308. The method of claim 297, wherein the tumor-specific neoepitope has a sequence of MFLKAESKI (SEQ ID NO: 568) and the subject express an MHC molecule encoded by a A24:02 HLA allele.

309. The method of claim 297, wherein the tumor-specific neoepitope has a sequence of VLPEPHLAL (SEQ ID NO: 594) and the subject express an MHC molecule encoded by a A02.01 HLA allele.

310. The method of claim 297, wherein the tumor-specific neoepitope has a sequence of YMFLKAESKI (SEQ ID NO: 598) and the subject express an MHC molecule encoded by a A24:02 or HLA allele.

311. The method of claim 296, wherein the tumor-specific neoepitope has a sequence of APSESPCSPF (SEQ ID NO: 1431), CPLDHTTPPA (SEQ ID NO: 1432), FLQEQYHEA (SEQ ID NO: 1433), RLAFLQEQYH (SEQ ID NO: 1434), SPCSPFRLAF (SEQ ID NO: 1435) or SPPWVRALL (SEQ ID NO: 1436).

312. The method of claim 295, wherein the cancer is breast cancer.

313. The method of claim 312, wherein the breast cancer is selected from the group consisting of metastatic breast cancer, breast invasive carcinoma, luminal NS carcinoma of breast, HER-2-positive breast cancer and MSI+ breast cancer.

314. The method of claim 295, wherein the pharmaceutical composition further comprises an adjuvant.

315. The method of claim 295, wherein the method further comprises administering an immune checkpoint inhibitor.
